(19) United States
(12) Patent Application Publication
(10) Pub. No.: US 2023/0285539 A1
(43) Pub. Date: Sep. 14, 2023

(54) VACCINES AGAINST SARS-COV-2 AND OTHER CORONAVIRUSES

(71) Applicants: The Henry M. Jackson Foundation for the Advancement of Military Medicine, Inc., Bethesda, MD (US); The Government of the United States, as Represented by the Secretary of the Army, Fort Detrick, MD (US)

(72) Inventors: Michael Gordon JOYCE, Silver Spring, MD (US); Kayvon MODJARRAD, Bethesda, MD (US)

(73) Assignees: Henry M. Jackson Foundation for the Advancement of Military Medicine, Inc., Bethesda, MD (US); The Government of the United States, as Represented by the Secretary of the Army, Fort Detrick, MD (US)

(21) Appl. No.: 17/905,614

(22) PCT Filed: Mar. 8, 2021
(86) PCT No.: PCT/US2021/021405

§ 371 Date: Sep. 2, 2022

Related U.S. Application Data
(60) Provisional application No. 62/986,522, filed on Mar. 6, 2020.
(60) Provisional application No. 63/038,600, filed on Jun. 12, 2020.

(51) Int. Cl. A61K 39/215; A61K 9/51; A61P 31/14

(52) U.S. Cl. CPC A61K 39/215; A61K 9/5169; A61P 31/14; A61K 2039/55505

(57) ABSTRACT

The present disclosure relates to the field of vaccines and binding molecules, as well as preparations and methods of their use in the treatment and/or prevention of disease. Described are vaccines and binding molecules, compositions containing the same, and uses thereof for treating or preventing coronavirus infections, in particular, β-coronaviruses such as SARS- CoV-2, the causative agent of COVID-19, as well as SARS-CoV-1 and other coronaviruses.

### FIELD OF INVENTION

[0001] The present disclosure relates to the field of vaccines, as well as preparations and methods of their use in the treatment and/or prevention of disease. Described are vaccines, pharmaceutical compositions containing the same, and uses thereof for treating or preventing coronavirus infections, including β-coronaviruses such as SARS-CoV-2, the causative agent of COVID-19.

### CROSS REFERENCE STATEMENT

[0002] This application claims priority under 35 U.S.C. § 119(e) to U.S. Provisional Application 62/986,522 filed Mar. 6, 2020, and to U.S. Provisional Application 63/038,600 filed Jun. 12, 2020. The entire contents of both provisional applications are incorporated herein by reference.

### GOVERNMENT SUPPORT CLAUSE

[0003] This invention was made with government support under W81XWH1820040 awarded by the Defense Health Agency. The government has certain rights in the invention.

### BACKGROUND

[0004] The following discussion is merely provided to aid the reader in understanding the disclosure and is not admitted to describe or constitute prior art thereto.

[0005] The emergence of SARS-CoV-2—also named COVID-19—marks the seventh coronavirus to be isolated from humans, and the third to cause a severe disease after severe acute respiratory syndrome (SARS) and Middle East respiratory syndrome (MERS). The rapid spread of SARS-CoV-2, and the grave risk it poses to global health, prompted the World Health Organization to declare, on 30 Jan. 2020, the COVID-19 outbreak to be a public health emergency of international concern and on 11 Mar. 2020 to be a pandemic. The rapidly evolving epidemiology of the pandemic has accelerated the need to elucidate the molecular biology of this novel coronavirus.

[0006] The present disclosure provides nanoparticle vaccines that can be used to treat or prevent coronavirus infection, such as infections caused by SARS-CoV-2 (i.e., COVID-19).

### SUMMARY

[0007] Described herein are vaccines for the treatment and/or prevention of infections caused by coronaviruses, such as SARS-CoV-2 (i.e., COVID-19), and methods and uses of the same.

[0008] In a first aspect, the present disclosure provides nanoparticles comprising a fusion protein comprising a nanoparticle-forming peptide and at least one antigenic coronavirus peptide selected from: a receptor-binding domain (RBD) of a coronavirus, or a fragment or variant thereof, an N-terminal domain (NTD) of a coronavirus, or a fragment or variant thereof, an S1 domain of a coronavirus, or a fragment or variant thereof, a stabilized extracellular spike S-2P domain of a coronavirus, or a fragment or variant thereof, a stabilized extracellular spike S domain of a coronavirus, or a fragment or variant thereof, or a stabilized extracellular spike S-trimer of a coronavirus, or a fragment or variant thereof.

[0009] The nanoparticle-forming peptide may comprise or be a ferritin protein or a fragment or variant thereof. The nanoparticle-forming peptide may comprise or be Helicobacter pylori ferritin (Hpf) or a fragment or variant thereof. The nanoparticle-forming peptide may comprise an amino acid sequence selected from:

ESQVRQQFSKDIEKLLNEQVNKEMQSSNLYMSMSSWCYTHSLDGAGLFLF
DHAAEEYEHAKKLIIFLNENNVPVQLTSISAPEHKFEGLTQIFQKAYEHE
QHISESINNIVDHAIKSKDHATFNFLQWYVAEQHEEEVLFKDILDKIELI
GNENHGLYLADQYVKGIAKSRKSGS

or a fragment or variant thereof,

DIIKLLNEQVNKEMQSSNLYMSMSSWCYTHSLDGAGLFLFDHAAEEYEHA
KKLIIFLNENNVPVQLTSISAPEHKFEGLTQIFQKAYEHEQHISESINNI
VDHAIKSKDHATFNFLQWYVAEQHEEEVLFKDILDKIELIGNENHGLYLA
DQYVKGIAKSRKSGS

or a fragment or variant thereof, or

SKDIIKLLNEQVNKEMQSSNLYMSMSSWCYTHSLDGAGLFLFDHAAEEYE
HAKKLIIFLNENNVPVQLTSISAPEHKFEGLTQIFQKAYEHEQHISESIN
NIVDHAIKSKDHATFNFLQWYVAEQHEEEVLFKDILDKIELIGNENHGLY
LADQYVKGIAKSRKSGS

or a fragment or variant thereof.

[0010] The nanoparticle may possess a 4-fold axis or a 3-fold axis.

[0011] The antigenic coronavirus peptide may be connected to the nanoparticle-forming peptide via a linker. The linker may comprise an amino acid sequence selected from: GSGGGG, GGGG, GSGG, GGG, and SGG.

[0012] The fusion protein may comprise 2-10 (e.g., 2, 3, 4, 5, 6, 7, 8, 9, or 10) antigenic coronavirus peptides connected in series, optionally via peptide linkers, which linkers may comprise an amino acid sequence selected from GSGGGG, GGGG, GSGG, GGG, and SGG.

[0013] The antigenic coronavirus peptide may be isolated or derived from a coronavirus selected from SARS-CoV-2, human coronavirus OC43 (hCoV-OC43), Middle East respiratory syndrome-related coronavirus (MERS-CoV), severe acute respiratory syndrome-related coronavirus (SARS-CoV-1), HKU-1, 229E, or NL63.

[0014] The nanoparticle may comprise one or more of an Hpf or a fragment or variant thereof connected via a peptide linker to an RBD or a fragment or variant thereof; an Hpf or a fragment or variant thereof connected via a peptide linker to an NTD or a fragment or variant thereof; an Hpf or a fragment or variant thereof connected via a peptide linker to an S1 or a fragment or variant thereof; an Hpf or a fragment or variant thereof connected via a peptide linker to a stabilized extracellular spike domain (S-2P) or a fragment or variant thereof; a sequence of any fusion protein disclosed in Table 3, and a sequence of any fusion protein disclosed in Table 18.

[0015] In some embodiments, the nanoparticle can bind to a human ACE-2 receptor, while in some embodiments, the nanoparticle cannot bind to a human ACE-2 receptor. In some embodiments, the nanoparticle can bind to anti-coronavirus antibody CR3022, or an ACE2 receptor.

[0016] In a second aspect, the present disclosure provides vaccines comprising any of the nanoparticles of the first aspect or otherwise disclosed herein. The vaccines may further comprise one or more adjuvants, such as one or more selected from ALFQ, alhydrogel, and combinations thereof.

[0017] In a third aspect, the present disclosure provides messenger RNA (mRNA) encoding any of the nanoparticles of the first aspect or otherwise disclosed herein.

[0018] In a fourth aspect, the present disclosure provides methods of treating or preventing a coronavirus infection in a subject in need thereof, comprising administering to a subject in need thereof any of the nanoparticles of the first aspect or otherwise disclosed herein, any of the vaccines of the second aspect or otherwise disclosed herein, or any of the mRNA of the third aspect or otherwise disclosed herein.

[0019] The subject may be at risk of contracting a coronavirus infection, or the subj ect may already have contracted a coronavirus infection.

[0020] The coronavirus may be SARS-CoV-2 or a variant thereof, such as B.1.1.7, B.1.351, and P1. Additionally or alternatively, the coronavirus may be SARS-CoV-1 or a variant thereof.

[0021] In a fifth aspect, the present disclosure provides any of the nanoparticles of the first aspect or otherwise disclosed herein, any of the vaccines of the second aspect or otherwise disclosed herein, or any of the mRNA of the third aspect or otherwise disclosed herein for use in treating or preventing a coronavirus infection in a subject in need thereof.

[0022] The subject may be at risk of contracting a coronavirus infection, or the subj ect may already have contracted a coronavirus infection.

[0023] The coronavirus may be SARS-CoV-2 or a variant thereof, such as B.1.1.7, B.1.351, and P1. Additionally or alternatively, the coronavirus can be SARS-CoV-1 or a variant thereof.

[0024] In a sixth aspect, the present disclosure provides uses of any of the nanoparticles of the first aspect or otherwise disclosed herein, any of the vaccines of the second aspect or otherwise disclosed herein, or any of the mRNA of the third aspect or otherwise disclosed herein in the preparation of a medicament for treating or preventing a coronavirus infection in a subject in need thereof.

[0025] Prior to being administered a nanoparticle or vaccine as disclosed herein, the subject may be administered a priming dose of a DNA sequence encoding a receptor-binding domain (RBD) of a coronavirus, or a fragment or variant thereof. The RBD may be a SARS-CoV-2 RBD. The DNA sequence may comprise SEQ ID NO: 282. The DNA sequence may encode a protein comprising SEQ ID NO: 283.

[0026] In a seventh aspect, the present disclosure provides methods of screening for binding molecules that are capable of binding to coronavirus, comprising using the nanoparticles listed in Table 18 to identify binding molecules that bind to the peptides with sequences listed in Table 18.

[0027] In an eighth aspect, the present disclosure provides DNA molecules comprising a sequence encoding any of the nanoparticles of the first aspect or otherwise disclosed herein. In alternative embodiments of the eighth aspect, the present disclosure provides DNA molecules comprising a sequence encoding a receptor-binding domain (RBD) of a coronavirus, or a fragment or variant thereof. The RBD may be from SARS-CoV-2. The DNA sequence may comprise SEQ ID NO: 282. The DNA sequence may encode a protein comprising SEQ ID NO: 283.

[0028] In a ninth aspect, the present disclosure provides plasmids comprising any DNA molecule of the eighth aspect or otherwise disclosed herein, wherein the plasmid can express the DNA molecule in vivo.

[0029] In a tenth aspect, the present disclosure provides methods of priming an immune response in a subject, comprising administering to a subject any DNA molecule of the eighth aspect or otherwise disclosed herein or any plasmid of the ninth aspect or otherwise disclosed herein, prior to administering to the subject any of the nanoparticles of the first aspect or otherwise disclosed herein, any of the vaccines of the second aspect or otherwise disclosed herein, or any of the mRNA of the third aspect or otherwise disclosed herein.

[0030] In an eleventh aspect, the present disclosure provides any DNA molecule of the eighth aspect or otherwise disclosed herein or any plasmid of the ninth aspect or otherwise disclosed herein for use in priming an immune response in a subject prior to administering to the subject any of the nanoparticles of the first aspect or otherwise disclosed herein, any of the vaccines of the second aspect or otherwise disclosed herein, or any of the mRNA of the third aspect or otherwise disclosed herein.

[0031] In a twelfth aspect, the present disclosure provides uses of any DNA molecule of the eighth aspect or otherwise disclosed herein or any plasmid of the ninth aspect or otherwise disclosed herein in the preparation of a medicament for in priming an immune response in a subject prior to administering to the subject any of the nanoparticles of the first aspect or otherwise disclosed herein, any of the vaccines of the second aspect or otherwise disclosed herein, or any of the mRNA of the third aspect or otherwise disclosed herein.

[0032] In a thirteenth aspect, the present disclosure provides methods of treating or preventing a coronavirus infection in a subject in need thereof, comprising administering to the subject an anti-coronavirus antibody obtained from or cloned from an immunized subject that was administered any of the nanoparticles of the first aspect or otherwise disclosed herein, any of the vaccines of the second aspect or otherwise disclosed herein, or any of the mRNA of the third aspect or otherwise disclosed herein.

[0033] In a fourteenth aspect, the present disclosure provides anti-coronavirus antibodies obtained from or cloned from an immunized subject that was administered any of the nanoparticles of the first aspect or otherwise disclosed herein, any of the vaccines of the second aspect or otherwise disclosed herein, or any of the mRNA of the third aspect or otherwise disclosed herein, for use in treating or preventing a coronavirus infection in a subject in need thereof.

[0034] In a fifteenth aspect, the present disclosure provides uses of an anti-coronavirus antibody obtained from or cloned from an immunized subject that was administered any of the nanoparticles of the first aspect or otherwise disclosed herein, any of the vaccines of the second aspect or otherwise disclosed herein, or any of the mRNA of the third aspect or otherwise disclosed herein, for use in the preparation of a medicament for treating or preventing a coronavirus infection in a subject in need thereof.

[0035] The foregoing general description and following detailed description are exemplary and explanatory and are intended to provide further explanation of the disclosure as claimed. Other objects, advantages, and novel features will be readily apparent to those skilled in the art from the following brief description of the drawings and detailed description of the disclosure.

### BRIEF DESCRIPTION OF THE DRAWINGS

[0036] FIG. 1 shows the design of SARS-CoV-2 Spike Domain-Ferritin Nanoparticles. A) Full length SARS-CoV-2 spike primary and three-dimensional structure. Molecular hinges identified by molecular dynamics simulations and electron cryotomography are labeled on the three-dimensional model. A single chain of the structured trimeric ectodomain is shaded according to the simple schematic diagram (top) with the N-terminal domain (NTD) and Receptor-Binding Domain (RBD) of the S1 polypeptide and the C-terminal coiled coil N-terminal to hinge 1. Remaining portions of the S1 and S2 polypeptides are shaded, with regions after the knee hinge colored in white. The transmembrane domain of all chains is depicted inside a patch of membrane. Truncation and optimization of the Spike C-terminal heptad repeat. Residues 1140 to 1161 between Hinge 1 and 2 are shown aligned to the ideal heptad repeat sequence. Residues in the native spike sequence which break this pattern are highlighted. These residues are also labeled and highlighted on the three-dimensional structure which are shaded according to the primary structure diagram. Two engineered sequences are aligned indicating the residue at which they were truncated and mutations made to enforce the heptad repeat are indicated. B) Primary structure and three-dimensional model of a Spike Trimer-Ferritin nanoparticle. Differences between the native spike sequence and the engineered nanoparticle are on the primary schematic (top). A three-dimensional model of a nanoparticles displaying eight trimeric spikes using PDB ID 6VXX and 3EGM is shaded accordingly with ferritin shown in alternating grey and white for clarity. The nanoparticle is depicted along one of the 4-fold symmetry axis of ferritin and one of the 3-fold symmetry axes of both the spike and ferritin. C) Identification of regions hindering assembly and Expression of RBD-Ferritin nanoparticles. The RBD of SARS-CoV-2 (PDB ID:6MOJ) is shown in isolation with the footprint of the ACE2 binding site outlined in dashed lines. Three hydrophobic surfaces are shown in light gray surface, with the corresponding residues shown underneath. A hydrophobic patch near the C-terminus of the RBD is buried by S2 and part of S1 in the trimeric context. Two other strips of hydrophobic residues occur near the ACE2 binding site with some residues contributing to ACE2 binding. D) Primary structure and three-dimensional model of an RBD-Ferritin nanoparticle. A modeled 24-mer nanoparticle display RBD epitopes is depicted along one of the 3-fold symmetry axis of ferritin and colored according to the primary structure of the RBD-ferritin fusion. Truncation points, linkers, and alterations made to the native spike sequence are indicated on the primary structure. E) Primary structure and three-dimensional model of a RBD-NTD-Ferritin nanoparticle. A modeled nanoparticle displaying RBD and NTD epitopes is depicted and colored according to the primary structure of the RBD-NTD-ferritin fusion. Truncation points, linkers, and alterations made to the native spike sequence are indicated on the primary structure. F) S1 forms a hydrophobic collar around the N-terminal beta sheet of S2. The C-terminus of S1 forms natively after furin cleavage. In order to express S1 without S2 in a monomeric context the sequence was first truncated prior to the furin site. However, to express soluble protein and S1-ferritin, the N-terminal portion of S2 was required and could be attached by a linker. The structured regions flanking the S1-S2 cleavage site are shown on PBD ID 6VXX with S1 colored in dark gray and S2 in light gray. A dashed line indicates the unmodelled loop which contains the furin site, and terminal residues of the structured portions of S1 and S2 are labeled. G) Primary structure and three-dimensional model of an S1-Ferritin nanoparticle. A modeled nanoparticle displaying RBD and NTD epitopes and perhaps epitopes comprising both domains is depicted and colored according to the primary structure of the S1-ferritin fusion. Truncation points and placement of linkers are indicated on the primary structure.

[0037] FIG. 2 shows the design of SARS-CoV-2 Spike-Ferritin Nanoparticles with extended helical coiled coil regions and/or incorporation of additional stabilization mutations in the S2 domain. Exemplary examples 1B-08, pCoV186, and pCoV187 are shown as examples with linear schematics, and models of the extended coiled-coil regions.

[0038] FIG. 3 shows details of select S Trimer-Ferritin nanoparticles including sequence information.

[0039] FIG. 4 shows the high-resolution structure of SARS-CoV-2 receptor-binding domain (RBD) in ribbon representation with specific residues labeled and shown in sphere representation. The hydrophobic surface that can be modified for improved production, stability, and yield of the RBD or RBD-Ferritin constructs.

[0040] FIG. 5 shows models of the SARS-CoV-2 RBD-Ferritin variants with increased nanoparticle formation, stability, and yield. Panel (A) shows the crystal structure of SARS-CoV-2 RBD and Panels (B-G) show variants comprising select amino acid modifications. Alterations to less hydrophobic residues or introduction of glycans at these residues will serve to increase nanoparticle yield, formation and stability. Panels (H-N) show variants comprising select amino acid modifications. Alterations to less hydrophobic residues or introduction of glycans at these residues will serve to increase nanoparticle yield, formation, and stability. Native residues shown in sphere representation.

[0041] FIG. 6 shows biochemical and biophysical characterization of exemplary Spike-Ferritin nanoparticles. A) Size-exclusion chromatography, B) protein expression yields from 1 L 293F, C) SDS-PAGE of representative Spike-Ferritin nanoparticles, D) dynamic light scattering analysis of the representative SpFN particles, E) negative-stain EM images of pCoV-1B-05 and SpFN_1B-06-PL nanoparticles, and representative 2D class average. Fusion proteins and the nanoparticles formed by the fusion proteins: a RBD and ferritin, a NTD and ferritin, S1 and ferritin, RBD-NTD and ferritin, and a stabilized prefusion S trimer and ferritin.

[0042] FIG. 7 shows biochemical and biophysical characterization of exemplary RBD-Ferritin nanoparticles. A,B) Size-exclusion chromatography, C) SDS-PAGE of representative RBD-Ferritin nanoparticles, D) dynamic light scattering analysis of the representative RBD-FN particles, E) protein expression yields from 1 L 293F, F) negative-stain EM images of RBD-Ferritin-pCoV131 nanoparticles, and representative 2D class average.

[0043] FIG. 8 shows biochemical and biophysical characterization of exemplary NTD-Ferritin nanoparticles. A) Size-exclusion chromatography, B) protein expression yields from 1 L 293F,C) SDS-PAGE of representative NTD-Ferritin nanoparticles, D) dynamic light scattering analysis of the representative NTD-Ferritin particles, F) negative-stain EM images of NTD-Ferritin-pCoV65 nanoparticles, and representative 2D class average.

[0044] FIG. 9 shows biochemical and biophysical characterization of exemplary S1-Ferritin nanoparticles. A) Size-exclusion chromatography, B) protein expression yields from 1 L 293F,C) SDS-PAGE of representative S1-Ferritin nanoparticles, D) dynamic light scattering analysis of the representative S1-Ferritin particles, F) negative-stain EM images of S1-Ferritin-pCoV111 nanoparticles, and representative 2D class average.

[0045] FIG. 10 shows biochemical and biophysical characterization of exemplary RBD-NTD-Ferritin nanoparticles. A) Size-exclusion chromatography, B) protein expression yields from 1 L 293F,C) SDS-PAGE of representative RBD-NTD-Ferritin nanoparticles, D) dynamic light scattering analysis of the representative RBD-NTD -Ferritin particles, F) negative-stain EM images of RBD-NTD-Ferritin-pCoV146 nanoparticles, and representative 2D class average.

[0046] FIG. 11 shows the negative-Stain Electron Microscopy 3D Reconstructions of SARS-CoV-2 Spike Domain-Ferritin Nanoparticles. A) Changes to native sequence made in the SpFN_1B-06-PL construct are depicted along with a negative stain 3D reconstruction with applied octahedral symmetry. An asymmetric unit of non-ferritin density is highlighted in dark gray. A trimeric model of SpFN_1B-06 is docked into the neg-stain map (shown in the inset). (B) RBD-Ferritin_pCoV131 (RFN-131) schematic (top) with the reconstructed 3D negative stain EM map shown with the RBD domain indicated in dark gray. C) RBD-NTD-Ferritin construct pCoV146 schematic (top) with the reconstructed 3D negative stain EM map shown with the RBD and NTD domains indicated in dark gray. D) S1-Ferritin construct pCoV111 schematic (top) with the reconstructed 3D negative stain EM map shown with the S1 domain indicated in dark gray. An asymmetric unit of non-ferritin density is highlighted in the inset. A model of the SARS-CoV-2 S1 molecule is docked into the neg-stain map (shown in the inset).

[0047] FIG. 12 shows the correlation between ID50 neutralization values for animals immunized with 8 Antigens and 2 Adjuvants (right hand side) plotted against Octet binding response (nm) at 180 sec at a 1:100 serum dilution. Samples were taken at week 2, week 5, and week 8.

[0048] FIG. 13 shows immunogenicity in C57BL/6 and Balb/c mice of SARS-CoV-2 SpFN_1B-06-PL adjuvanted with ALFQ or Alhydrogel elicited RBD-responses measured by Octet Biolayer Interferometry.

[0049] FIG. 14 shows antigenicity in C57BL/6 and Balb/c mice of SARS-CoV-2 SpFN_1B-06-PL adjuvanted with ALFQ or Alhydrogel induced RBD or S responses measured by ELISA.

[0050] FIG. 15 shows serum blocking of ACE2 interaction with SARS-CoV-2 RBD measured by Octet Biolayer Interferometry.

[0051] FIG. 16 shows SpFN_1B-06-PL adjuvanted with ALFQ or Alhydrogel in C57BL/6 and Balb/c mice pseudovirus SARS-CoV-2 neutralization.

[0052] FIG. 17 shows SpFN_1B-06-PL adjuvanted with ALFQ in C57BL/6 and Balb/c mice live-virus SARS-CoV-2 neutralization.

[0053] FIG. 18 shows antigenicity in C57BL/6 and Balb/c mice of SARS-CoV-2 SpFN_1B-06-PL (0.08 µg dose) adjuvanted with ALFQ measured by Octet Biolayer Interferometry.

[0054] FIG. 19 shows spike and RBD Antigenicity in C57BL/6 and Balb/c mice of SARS-CoV-2 SpFN_1B-06-PL (0.08 µg dose) adjuvanted with ALFQ measured by ELISA.

[0055] FIG. 20 shows SpFN_1B-06-PL (0.08 µg dose) adjuvanted with ALFQ in C57BL/6 and Balb/c mice pseudovirus SARS-CoV-2 neutralization.

[0056] FIG. 21 shows SpFN_1B-06-PL (0.08 µg dose) adjuvanted with ALFQ in C57BL/6 and Balb/c mice live-virus SARS-CoV-2 neutralization.

[0057] FIG. 22 Analysis of cellular response following immunization with SpFN + ALFQ. (A) Sera collected on day 10 from immunized mice were added in quadruplicate serial dilutions to ELISA plates coated with S-2P protein. Duplicated wells were probed with anti-mouse-IgG1-HRP. Additional duplicates were probed with either anti-mouse-IgG2c-HRP or anti-mouse IgG2a-HRP for C57BL/6 and BALB/c mice, respectively. Data was interpolated to obtain the dilution factor at OD450 of 1, and plotted as ratios of IgG2/IgG1. (B) Splenocytes were collected 10 day after immunization and prepared for surface and intracellular staining and flow cytometry for analysis. Initial gating identified CD4+ and CD8+ T cell population, and further analysis of the frequency of CD4+ and CD8+ cells producing Th1-specific cytokines IL-2, IFN-g and TNF-a, and Th2-specific cytokine IL-4.

[0058] FIG. 23 shows frequency of SARS-CoV-2 Spike specific cytokine secreting (A) CD4⁺ T-cells and (B) CD8+ T cells in splenocytes of C57BL/6 mice vaccinated with SpFN + AH (Group 1) or SpFN + ALFQ (Group 2) at Days 3, 5, 7, and 10.

[0059] FIG. 24 shows the vaccine elicited serum from SpFN and RBD-Ferritin vaccinated mice provides protective immunity in K18-ACE2 transgenic mice against SARS-CoV-2. A) Polyclonal Ig from immunized C57BL/6 mice was purified and administered intraperitoneally to recipient mice prior to infection with SARS-CoV-2 virus. Three antibody amounts (high, medium and low) were provided to animal groups from either the SpFN-vaccinated mice, or the RBD-Ferritin immunized mice. Mouse IgG was purified from pooled naive sera and given to 10 mice as a control group, and an additional control group received PBS. B) Schematic of the mouse transfusion and challenge study timeline. C) Mouse serum samples were taken just prior to challenge and measured for SARS-CoV-2 pseudovirus neutralization. D) Percentage change in mouse body weight. Groups are defined based on ID50 GMT shown in panel C. E) Percentage survival of K18-ACE2 mice. Each group is defined by the Immune sera type and the group GMT values from panel C.

[0060] FIG. 25 shows the Octet Biolayer Interferometry measurement of vaccinated mouse sera (week 10) reactivity to RBD molecules. Immunogens used to vaccinate mice are indicated at the top of the plots, mouse strain (legend) and the average binding value for each group of mice is indicated at the base of the plot. A) Mouse sera binding to SARS-CoV-2 or SARS-CoV-1 RBD molecules. B) SpFN_1B-06-PL-, C) pCoV131, D) pCoV111-vaccine-elicited sera binding to SARS-CoV-2 and variant RBD molecules. The RBD mutations are indicated on the x-axis of the graph.

[0061] FIG. 26 shows that immunization with SARS-CoV-2 immunogens (SpFN_1B-06-PL or RBD-Ferritin_pCoV131) elicits potent neutralizing immune responses against both SARS-CoV-2 and SARS-CoV-1.

[0062] FIG. 27 shows that immunization in rhesus macaques with SpFN_1B-06-PL or RFN_pCoV131 induced robust IgG binding and neutralization responses. Antibody responses in serum were assessed every 2 weeks following vaccination by MSD binding to Spike protein (A) or pseudovirus neutralization assay (B) Thick lines indicate geometric means within each group. Responses were compared between vaccination groups at week 8 - either Spike binding by MSD (C), pseudovirus neutralization assay (D), inhibition of ACE2 binding as measured by MSD (E) and live virus neutralization (F). Significance was assessed using a Kruskal-Wallis test followed by a Dunn’s post-test.

[0063] FIG. 28 shows that vaccination with SpFN_1B-06-PL and RFN_pCoV131 elicited antibody responses to SARS-1. Binding responses were measured at week 6 by Biolayer Interferometry (A). Circles indicate binding responses to SARS-CoV-2 RBD, and squares indicate binding to SARS-CoV-1 RBD. (B) Pseudovirus neutralization measured against SARS-CoV-1 at week 8. Significance was assessed using a Kruskal-Wallis test followed by a Dunn’s post-test.

[0064] FIG. 29 shows the CD4⁺ memory T cell responses to Spike assessed at week 8 by intracellular cytokine staining. Responses shown are the summed responses from cells stimulated with Spike 1 and Spike 2 peptide pools. Closed circles indicate animals with a positive response at week 8 (defined as greater than 3 times the background of the total group measured at baseline). Open circles indicate animals with non-positive responses. Summary of positive responses is shown below each graph. Th1 responses (summed IFNg, TNF and IL-2) are shown in A, and Th2 responses (summed IL-4 and IL-13) are shown in B. Individual cytokine responses to CD40L (C) and IL-21 (D) are also shown. Significance was assessed using a Kruskal-Wallis test followed by a Dunn’s post-test.

[0065] FIG. 30 shows the viral replication in the lower and upper airways after SpFN_1B-06-PL or RFN_pCoV131 vaccination and subsequent SARS-CoV-2 respiratory challenge. Subgenomic messenger RNA (sgmRNA) copies per milliliter were measured in the nasopharyngeal swabs (Top Panel), bronchoalveolar lavage fluid (Middle Panel), and saliva (Lower panel) of vaccinated and control animals for two weeks following intranasal and intratracheal SARS-CoV-2 (USA-WA1/2020) challenge of vaccinated and control animals. Specimens were collected on 1, 2, 4, 7, 10, and 14 days post-challenge. Dotted lines demarcate the assay lower limit of linear performance range (corresponding to 450 copies/ml). In the box plots, horizontal lines indicate the mean and the top and bottom reflect the minimum and maximum.

[0066] FIG. 31 shows the Histopathological Analysis after SARS-CoV-2 Challenge in Unvaccinated and SpFN-Vaccinated Rhesus Macaques. A-C Histopathology of representative hematoxylin-and-eosin-stained, paraffin-embedded lung parenchyma at 7 dpi. Significant interstitial pneumonia is present only in the unvaccinated animals (A), characterized by inflammatory necrotic debris (white star), type II pneumocyte hyperplasia (black arrow), edema (triangle), and vasculitis of small- to medium- calliber blood vessels (white arrows). Interstitial pneumonia was not observed in the vaccinated animals (B, C). Scale bars, 50 µm.D-F. Immunohistochemical analysis of paraffin-embedded lung parenchyma at 7 dpi. SARS-CoV-2 viral antigen was detected in the lungs of unvaccinated animals (D.) Scale bar, 100 µm. Inset: SARS-CoV-2 viral antigen was detected in alveolar pneumocytes (thick arrow), pulmonary macrophages (arrowhead), and, rarely, endothelial cells (thin arrow). Scale bar, 20 µm. Viral antigen was not detected in vaccinated animals (E, F). Scale bars, 100 µm.

[0067] FIG. 32 shows the immunogenicity of SpFN or RFN in rhesus macaques measured by MSD. IgG binding responses were measured to RBD (A). Inhibition of ACE2 binding to either the full spike protein (B) or RBD (C) are shown. Antibody responses in serum were assessed every 2 weeks following immunization and challenge. Thick lines indicate geometric means within each group.

[0068] FIG. 33 shows the immunogenicity of SpFN_1B-06-PL or RBD-FN_pCoV131 in rhesus macaques measured by Biolayer Interferometry. SARS-CoV-2 RBD-specific binding antibody responses in serum were assessed every 2 weeks following immunization and challenge.

[0069] FIG. 34 shows the immunogenicity of SpFN or RBD-FN in rhesus macaques measured by SARS-CoV-2 live virus neutralization. A live-virus neutralization assay for SARS-CoV-2 assessed responses in serum 4 weeks following each immunization. Thick lines indicate geometric means within each group.

[0070] FIG. 35 shows the SpFN_1B-06-PL and RBD-Ferritin_pCoV131 vaccinated rhesus macaque sera neutralizes multiple strains of SARS-CoV-2 including WA1/2020, and emergent strains B.1.1.7 and B.1.351 in a live-virus neutralization assay.

[0071] FIG. 36 shows the CD8+ memory T cell responses to Spike assessed at week 8 by intracellular cytokine staining. Responses shown are the summed responses from cells stimulated with Spike 1 and Spike 2 peptide pools. Th1 include summed IFNg, TNF and IL-2. Significance was assessed using a Kruskal-Wallis test followed by a Dunn’s post-test.

[0072] FIG. 37 shows the CD4⁺ (A-D) and CD8+ (E) memory T cell responses to Spike were assessed at week 8 by intracellular cytokine staining. Responses shown are the summed responses from cells stimulated with Spike 1 and Spike 2 peptide pools. Responses were measured at weeks 6 and 8 (2 and 4 weeks following the second vaccination) and weeks 9/10 (½ weeks following challenge). CD4+ Th1 responses (summed IFNg, TNF and IL-2) are shown in A, and CD4+ Th2 responses (summed IL-4 and IL-13) are shown in B. Individual CD4+ cytokine responses to CD40L (C) and IL-21 (D) are also shown. CD8+ Th1 responses (summed IFNg, TNF and IL-2) are shown in E.

[0073] FIG. 38 shows the Individual IFNg, TNF and IL-2 CD4+ memory T cell responses to Spike were assessed at week 8 by intracellular cytokine staining. For A and B responses shown are the summed responses from cells stimulated with Spike 1 and Spike 2 peptide pools. Significance was assessed using a Kruskal-Wallis test followed by a Dunn’s post-test.

[0074] FIG. 39 shows the ratio of Th1 to Th2 cells determined at week 8 in animals with positive Th2 responses. The dashed line indicates an equal proportion of Th1:Th2 cells.

[0075] FIG. 40 shows the Antibody effector responses as measured in plasma following immunization with SpFN or RFN.

[0076] FIG. 41 shows the viral RNA measured in NP swabs (A), BAL (B) and Saliva (C) following IN/IT SARS-CoV-2 challenge of vaccinated and control animals. SARS-CoV-2 total RNA is shown for days 1, 2, 4, 7, 10, and 14 post-challenge. Dotted line indicates the assay lower limit of linear performance range (corresponding to 450 copies/ml). Values that fall on the line represent samples in which viral load was detected, but values are less than 450 copies/mL.

[0077] FIG. 42 shows the histopathological analysis after SARS-CoV-2 Challenge in RBD_pCoV131- and SpFN_1B-06-PL-vaccinated Rhesus Macaques. Interstitial pneumonia was not observed in the vaccinated animals (A-C). Scale bars, 50 µm. Immunohistochemical analysis of paraffin-embedded lung parenchyma at 7 dpi. Viral antigen was not detected in vaccinated animals (D-F). Scale bars, 100 µm.

[0078] FIG. 43 shows the Histopathological Analysis after SARS-CoV-2 Challenge in RBD and SpFN-Vaccinated Rhesus Macaques(A) Minimal to mild foci of cellular infiltrates centered around small- to- medium- caliber pulmonary arteries were occasionally noted in some of the animals of all of the vaccine groups. Scale bar, 50 µm. (B) Type II pneumocyte hyperplasia (TIIPH) in an unvaccinated animal. Scale bar, 20 µm.

[0079] FIG. 44 shows that immunization with a mixture of SARS-CoV-2 SpFN and SARS-CoV-1 SpFN immunogens elicits potent binding antibodies against both SARS-CoV-2 and SARS-CoV-1.

[0080] FIG. 45 shows that immunization with a mixture of SARS-CoV-2 SpFN and SARS-CoV-1 SpFN immunogens elicits potent neutralizing antibodies against both SARS-CoV-2 and SARS-CoV-1 as shown by the ID50 (top 4 panels) and ID80 (lower 4 panels) pseudovirus neutralization titers.

[0081] FIG. 46 shows the negative-stain EM characterization of Spike-Ferritin nanoparticles for SARS-CoV-1, HKU-1 and 229E coronaviruses. Proteins were produced in 293F cells, purified by GNA-lectin and size-exclusion chromatography. Purified nanoparticles were visualized on copper grids (top) using a TEM, with 2D class averages (middle), and 3D models (lower) of the nanoparticles shown.

[0082] FIG. 47 shows the serum blocking of ACE2 interaction with SARS-CoV-2 RBD as measured by Octet Biolayer Interferometry. PBS and mouse sera prior to immunization was used to show the specific inhibitory effect following vaccination.

[0083] FIG. 48 shows the immunization of C57BL/6 and Balb/c mice with SARS-CoV-2 RBD DNA prime followed by RBD or RBD-Ferritin boost elicited SARS-COV-2 RBD responses measured by ELISA.

[0084] FIG. 49 shows the schematic of the Spike-Ferritin -- RBD-Ferritin heterologous prime-boost experiment, and the OCTET binding responses to the SARS-CoV-2 RBD.

[0085] FIG. 50 shows the electrostatic potential of the SARS-CoV-2 RBD in surface representation. A view of the RBD from the side is shown on the left, and a view of the RBD from the “top” with the ACE-2 receptor site indicated is shown on the right. Lighter regions indicate a hydrophobic surface that can be modified for improved production, stability and yield of the RBD or RBD-Ferritin constructs.

[0086] FIG. 51 shows space-filled representations of exemplary nanoparticles that comprise a 4-fold axis or a 3-fold axis.

[0087] FIG. 52 shows exemplary fusion proteins and the nanoparticles formed by the fusion proteins: a RBD and ferritin, a NTD and ferritin, S1 and ferritin, RBD-NTD and ferritin, and a stabilized prefusion S trimer and ferritin.

[0088] FIG. 53 shows TEM images of select nanoparticles.

[0089] FIG. 54 shows linear and modular schematics of a vaccine particle comprising multiple RBDs in a “beads on a string” format.

### DETAILED DESCRIPTION

[0090] The present disclosure provides nanoparticle vaccines for treating or preventing coronavirus infections and coronavirus infectious diseases, such as but not limited to COVID-19, which is caused by SARS-CoV-2. The disclosed nanoparticles are made up of fusion proteins that comprise a nanoparticle-forming peptide and an antigenic coronavirus peptide, which may be optionally joined together via a linker. The fusion proteins are capable of self-assembling into nanoparticles that are stable in solution and able to generate a protective neutralizing immune response (i.e., the production of neutralizing antibodies and/or defensive cytokines) when administered to a subject. In addition to the nanoparticles, the disclosed vaccines may also comprise an adjuvant.

### I. Definitions

[0091] It is to be understood that the terminology used herein is for the purpose of describing particular embodiments only, and is not intended to be limiting.

[0092] Technical and scientific terms used herein have the meanings commonly understood by one of ordinary skill in the art, unless otherwise defined. Unless otherwise specified, materials and/or methodologies known to those of ordinary skill in the art can be utilized in carrying out the methods described herein, based on the guidance provided herein.

[0093] As used herein, the singular terms “a,” “an,” and “the” include plural referents unless the context clearly dictates otherwise. Reference to an object in the singular is not intended to mean “one and only one” unless explicitly so stated, but rather “one or more.”

[0094] As used herein, “about” when used with a numerical value means the numerical value stated as well as plus or minus 10% of the numerical value. For example, “about 10” should be understood as both “10” and “9-11.”

[0095] As used herein, a phrase in the form “A/B” or in the form “A and/or B” means (A), (B), or (A and B); a phrase in the form “at least one of A, B, and C” means (A), (B), (C), (A and B), (A and C), (B and C), or (A, B, and C).

[0096] As used herein, the term “comprising” is intended to mean that the compositions and methods include the recited elements, but does not exclude others.

[0097] As used herein, a “variant” when used in the context of referring to a peptide means a peptide sequence that is derived from a parent sequence by incorporating one or more amino acid changes, which can include substitutions, deletions, or insertions. For the purposes of this disclosure, a variant may comprise an amino acid sequence that shares about 80%, about 81%, about 82%, about 83%, about 84%, about 85%, about 86%, about 87%, about 88%, about 89%, about 90%, about 91%, about 92%, about 93%, about 94%, about 95%, about 96%, about 97%, about 98%, about 99%, or up to about 100% sequence identity or homology with the reference (or “parent”) sequence. For purposes of this disclosure, the terms “variant” and “derivative” when used in the context of referring to a peptide are used interchangeably.

[0098] As used herein, a “variant” when used in the context of referring to a virus (e.g., SARS-CoV-2) means a virus that is a progeny of a reference (or “parent”) virus that possesses one or more changes in its genome (e.g., a RNA genome), or a virus that is genetically engineered to have one or more changes in its genome, relative to a reference (or “parent”) virus, which may or may not result in changes to the proteins encoded by the RNA sequence (e.g., one or more proteins of a variant virus may include substitutions, deletions, or insertions compared to a parent strain). For example, known variants of SARS-CoV-2 include, but are not limited to, B.1.1.7 (first identified in the United Kingdom), B.1.351 (first identified in South Africa), and P.1 (first identified in Brazil). For the purposes of this disclosure, a variant of a virus may comprise a genome sequence that shares about 80%, about 81%, about 82%, about 83%, about 84%, about 85%, about 86%, about 87%, about 88%, about 89%, about 90%, about 91%, about 92%, about 93%, about 94%, about 95%, about 96%, about 97%, about 98%, about 99%, or up to about 100% sequence identity or homology with the reference (or “parent”) genome sequence.

[0099] As used herein, the phrases “effective amount,” “therapeutically effective amount,” and “therapeutic level” mean the dosage or concentration of a disclosed vaccine that provides the specific pharmacological effect for which the vaccine is administered in a subject in need of such treatment, i.e. to treat or prevent a coronavirus infection (e.g., MERS, SARS, or COVID-19). It is emphasized that a therapeutically effective amount or therapeutic level of a vaccine will not always be effective in treating or preventing the infections described herein, even though such dosage is deemed to be a therapeutically effective amount by those of skill in the art. For convenience only, exemplary dosages, drug delivery amounts, therapeutically effective amounts, and therapeutic levels are provided herein. The therapeutically effective amount may vary based on the route of administration and dosage form, the age and weight of the subject, and/or the subject’s condition, including the type and severity of the coronavirus infection.

[0100] The terms “treat,” “treatment” or “treating” as used herein with reference to a coronavirus infection refer to reducing or eliminating viral load or eliminating histopathology or virus presence in the airways or lungs.

[0101] The terms “prevent,” “preventing” or “prevention” as used herein with reference to a coronavirus infections refer to precluding or reducing the risk of an infection from developing in a subject exposed to a coronavirus, or to precluding or reducing the risk of developing a high viral load of coronavirus or reducing or eliminating histopathology or virus presence in the airways or lungs. Prevention may also refer to the prevention of a subsequent infection once an initial infection has been treated or cured. Prevention may also refer to the prevention of or reduction of risk of transmission of virus from one subject host to another subject host.

[0102] The terms “individual,” “subject,” and “patient” are used interchangeably herein, and refer to any individual mammalian subject, e.g., bovine, canine, feline, equine, or human. In specific embodiments, the subject, individual, or patient is a human.

### II. Coronaviruses

[0103] Coronaviruses are a family of viruses (i.e., the coronaviridae family) that cause respiratory infections in mammals and that comprise a genome that is roughly 30 kilobases in length. The coronaviridae family is divided into four genera and the genome encodes 28 proteins across multiple open reading frames, including 16 non-structural proteins (nsp) that are post-translationally cleaved from a polyprotein.

[0104] The coronaviridae family includes both α-coronaviruses or β-coronaviruses, which both mainly infect bats, but can also infect other mammals like humans, camels, and rabbits. β-coronaviruses have, to date, been of greater clinical importance, having caused epidemics of diseases with high mortality such as severe acute respiratory syndrome (SARS), Middle East respiratory syndrome (MERS), and COVID-19. Other disease-causing β-coronaviruses include OC44, and HKU1. Non-limiting examples of disease-causing α-coronaviruses include, but are not limited to, 229E and NL63.

[0105] Although SARS-CoV-2 is a newly identified virus, it shares genetic and morphologic features with others in the Coronaviridae family, particularly those from the β-coronavirus genus. The genome of the recently isolated SARS-CoV-2 shares 82% nucleotide identity with human SARS-CoV (SARS-CoV-1) and 89% with bat SARS-like-CoVZXC21 (Lu et al., 2020). The spike (S) glycoprotein, in particular, bears significant structural homology with SARS-CoV-1 compared to other coronaviruses such as MERS-CoV. Like SARS-CoV-1, the surface Spike (S) glycoprotein of SARS-CoV-2 binds the same host receptor, ACE-2, to mediate cell entry (Letko et al., 2020; Yan et al., 2020a). S—a class I fusion protein—is also a critical determinant of viral host range and tissue tropism and the primary target of the host immune response (Li, 2016). As such, most coronavirus vaccine candidates are based on S or one of its sub-components. Coronavirus S glycoproteins contain three segments: a large ectodomain, a single-pass transmembrane anchor and a short intracellular tail. The ectodomain consists of a receptor-binding subunit, S1, which contains two sub-domains: one at the N-terminus and the other at the C-terminus. The latter comprises the receptor-binding domain (RBD), which serves the vital function of attaching the virus to the host receptor and triggering a conformational change in the protein that results in fusion with the host cell membrane through the S2 subunit.

[0106] Multiple technology platforms are currently advancing SARS-CoV-2 vaccine development, including nucleic acid vaccines, whole virus vaccines, recombinant protein subunit vaccines and nanoparticle vaccines. Of these vaccine platform types, nanoparticle technologies have previously been shown to improve antigen structure and stability, as well as vaccine targeted delivery, immunogenicity, and safety.

[0107] In some embodiments, the coronavirus that is treated or prevented by the disclosed vaccines is a β-coronavirus. In some embodiments, the β-coronavirus is selected from the group consisting of severe acute respiratory syndrome coronavirus 2 (SARS-CoV-2) (also known by the provisional name 2019 novel coronavirus, or 2019-nCoV or COVID-19), human coronavirus OC43 (hCoV-OC43), Middle East respiratory syndrome-related coronavirus (MERS-CoV, also known by the provisional name 2012 novel coronavirus, or 2012-nCoV), severe acute respiratory syndrome-related coronavirus (SARS-CoV, also known as SARS-CoV-1), HKU-1, 229E, and NL63. In some embodiments, the β-coronaviruses is SARS-CoV-2, the causative agent of COVID-19. In some embodiments, the disclosed vaccines may provide a broad spectrum treatment and/or prevention for multiple different types of coronavirus, such as MERS-CoV, SARS-CoV-1, and/or SARS-CoV-2.

### III. Nanoparticle Vaccines and Binding Agents

[0108] Disclosed herein are vaccines that can be used to treat or prevent coronavirus infections such as but not limited to COVID-19, which is caused by SARS-CoV-2. In particular, the disclosed vaccines can comprise a fusion protein comprising a nanoparticle-forming peptide and an antigenic coronavirus peptide, which may optionally be connected by a linker (i.e., a “linker domain”). The antigenic coronavirus peptide may comprise one or more fragments or full-length proteins derived from a coronavirus (e.g., SARS-CoV-2 or SARS-CoV-1).

### A. Nanoparticle-Forming Peptide

[0109] The nanoparticle-forming peptide of a vaccine as disclosed herein may be any suitable nanoparticle-forming peptide. H. pylori ferritin and fragments and variants thereof are particularly suitable to serve as a nanoparticle-forming peptides for vaccines as disclosed herein. Thus, the nanoparticle-forming peptide of a vaccine as disclosed herein may comprise a Helicobacter pylori ferritin protein (HpF) or fragment or variant thereof. For instance, the nanoparticle component may comprise the following amino acid sequence derived from H. pylori ferritin:

ESQVRQQFSKDIEKLLNEQVNKEMQSSNLYMSMSSWCYTHSLDGAGLFLF
DHAAEEYEHAKKLIIFLNENNVPVQLTSISAPEHKFEGLTQIFQKAYEHE
QHISESINNIVDHAIKSKDHATFNFLQWYVAEQHEEEVLFKDILDKIELI
GNENHGLYLADQYVKGIAKSRKSGS (SEQID NO: 1).

[0110] Thus, the nanoparticle-forming peptide of the vaccine may comprise the foregoing H. pylori ferritin sequence (SEQ ID NO: 1) or a variant thereof, which may comprise 1, 2, 3, 4, 5, 6, 7, 8, 9, 10, 11, 12, 13, 14, or 15 or more substitution, deletion, or insertion mutations. For example, the nanoparticle-forming peptide may comprise a variant of SEQ ID NO: 1 that may comprise a deletion of 1, 2, 3, 4, 5, 6, 7, 8, 9, or 10 or more amino acids from the N-terminal domain of SEQ ID NO: 1. In some embodiments, that nanoparticle-forming peptide may comprise a substitution of the glutamic acid residue (E) at position 13 of SEQ ID NO: 1. In some embodiments, that nanoparticle-forming peptide may comprise a substitution of the glutamic acid residue (E) at position 13 of SEQ ID NO: 1 and a deletion of 1, 2, 3, 4, 5, 6, 7, 8, 9, or 10 or more amino acids from the N-terminal domain of SEQ ID NO: 1, such as in the following sequences:

DIIKLLNEQVNKEMQSSNLYMSMSSWCYTHSLDGAGLFLFDHAAEEYEHA
KKLIIFLNENNVPVQLTSISAPEHKFEGLTQIFQKAYEHEQHISESINNI
VDHAIKSKDHATFNFLQWYVAEQHEEEVLFKDILDKIELIGNENHGLYLA
DQYVKGIAKSRKSGS (SEQ ID NO: 2); or

SKDIIKLLNEQVNKEMQSSNLYMSMSSWCYTHSLDGAGLFLFDHAAEEYE
HAKKLIIFLNENNVPVQLTSISAPEHKFEGLTQIFQKAYEHEQHISESIN
NIVDHAIKSKDHATFNFLQWYVAEQHEEEVLFKDIlDKIELIGNENHGLY
LADQYVKGIAKSRKSGS (SEQ ID NO: 3).

[0111] In some embodiments, the nanoparticle-forming peptide may comprise a variant of any of SEQ ID NO: 1, SEQ ID NO: 2, or SEQ ID NO: 3, which may comprise an amino acid sequence that shares about 80%, about 81%, about 82%, about 83%, about 84%, about 85%, about 86%, about 87%, about 88%, about 89%, about 90%, about 91%, about 92%, about 93%, about 94%, about 95%, about 96%, about 97%, about 98%, about 99%, or up to 100% sequence identity or homology with any of SEQ ID NO: 1, SEQ ID NO: 2, or SEQ ID NO: 3.

[0112] As noted above, in some embodiments, the nanoparticle-forming peptide may be a non-ferritin-based peptide, such as a peptide that comprises the following sequence or a fragment or variant thereof:

MQIYEGKLTAEGLRFGIVASRFNHALVDRLVEGAIDAIVRHGGREEDITL
VRVPGSWEIPVAAGELARKEDIDAVIAIGVLIRGATPHFDYIASEVSKGL
ADLSLELRKPITFGVITADTLEQAIERAGTKHGNKGWEAALSAIEMANLF
KSLR (SEQ ID NO: 4).

[0113] In some embodiments, the nanoparticle-forming peptide may comprise a variant of SEQ ID NO: 4, which may comprise 1, 2, 3, 4, 5, 6, 7, 8, 9, 10, 11, 12, 13, 14, or 15 or more substitution, deletion, or insertion mutations in SEQ ID NO: 4. In some embodiments, the nanoparticle-forming peptide may comprise a variant of SEQ ID NO: 4 that may comprise an amino acid sequence that shares about 80%, about 81%, about 82%, about 83%, about 84%, about 85%, about 86%, about 87%, about 88%, about 89%, about 90%, about 91%, about 92%, about 93%, about 94%, about 95%, about 96%, about 97%, about 98%, about 99%, or up to 100% sequence identity or homology with SEQ ID NO: 4.

### B. Linker Domain

[0114] The disclosed fusion proteins generally comprise a flexible amino acid linker; however, the linker domain (i.e. linker) is optional and in some embodiments the nanoparticle-forming peptide may be directly joined with the antigenic coronavirus peptide. The linker may be about 3 to about 50 amino acids in length, or more particularly about 4 to about 42 amino acids in length. In some embodiments, the linker may be 3, 4, 5, 6, 7, 8, 9, 10, 11, 12, 13, 14, 15, 16, 17, 18, 19, 20, 21, 22, 23, 24, 25, 26, 27, 28, 29, 30, 31, 32, 33, 34, 35, 36, 37, 38, 39, 40, 41, or 42 amino acids in length. The linker domain may comprise glycine (G) repeats and or a combination of glycine (G) and serine (S) residues. Several exemplary linker sequences are disclosed in Table 1 below.

TABLE 1

Exemplary Linker Sequences

| Linker Sequence | SEQ ID NO |
|---|---|
| GSGG | 5 |
| GSGGSG | 6 |
| GSGGEMKQIEDKIEEILSKIYHIENEIARIKKLIGRGSGGSG | 7 |
| LDSIKEELDKIHKNGSGGSG | 8 |
| IDSIKEEIDKIHKNGSGGSG | 9 |
| MKQIEDKIEEILSKIYHIENEIARIKKLIGRGSGGSG | 10 |
| GSGGGG | 11 |
| GSG | 12 |
| GSGGSGGSGGSGGG | 13 |
| GGGSGGGSGG | 14 |
| GGGG | 15 |
| GGG | 16 |
| SGG | 17 |

[0115] The linker domain may comprise 1, 2, or 3 repeats of any one of SEQ ID NOs: 5-17. In some embodiments, the linker domain comprises a variant of any one of SEQ ID NOs: 5-17 that may comprise an amino acid sequence that shares about 80%, about 81%, about 82%, about 83%, about 84%, about 85%, about 86%, about 87%, about 88%, about 89%, about 90%, about 91%, about 92%, about 93%, about 94%, about 95%, about 96%, about 97%, about 98%, about 99%, or up to 100% sequence identity or homology with any one of SEQ ID NOs: 5-17.

[0116] The foregoing linker sequences are not intended to be limiting, and those of skill in the art will understand that other flexible peptide linkers may also be suitable for connecting the nanoparticle-forming peptide and the antigenic coronavirus peptide, based on the guidance provided herein.

### C. Antigenic Coronavirus Peptide

[0117] In general, the antigenic coronavirus peptide of the disclosed fusion proteins comprises a coronavirus spike protein (also known as “S protein” or “glycoprotein S”), which is generally responsible for viral entry into a host cell, or a fragment or a variant thereof. In some embodiments, the antigenic coronavirus peptide may comprise 1, 2, or 3 or more distinct domains of a coronavirus spike protein connected together in sequence, and in such embodiments, a linker may optionally separate the distinct domains.

[0118] The spike protein is selected as an antigenic coronavirus peptide of vaccines as disclosed herein, because antibodies that develop against this peptide are likely to be neutralizing. The spike protein comprises two functional subunits responsible for binding to the host cell receptor (Si subunit) and fusion of the viral and cellular membranes (S₂ subunit). A fusion protein of the present disclosure may comprise the entire spike protein, only the S₁ subunit, only the S₂ subunit, or any antigenic/immunogenic fragment or variant thereof. In some embodiments, the fusion protein comprises full length coronavirus spike protein sequence. In some embodiments, the fusion protein comprises a variant that comprises about 20%, about 25%, about 30%, about 35%, about 40%, about 45%, about 50%, about 55%, about 60%, about 65%, about 70%, about 75%, about 80%, about 85%, about 90%, 91%, 92%, 93%, 94%, 95%, 96%, 97%, 98%, or 99% of a coronavirus spike protein (e.g., SEQ ID NO: 18), so long as the fragment is able to elicit an immune response (i.e., it is an antigenic fragment).

[0119] While not wanting to be bound by theory, it is understood that the spike protein of SARS-CoV-2 attaches to human angiotensin converting enzyme (ACE)-2 cell surface receptors facilitating human infection. Thus, antibodies that can bind to the spike glycoprotein and prevent interaction with the ACE2 receptor can facilitate protection from infection. The SARS-CoV-2 spike protein (NCBI Reference Sequence: YP_009724390.1) comprises 1273 amino acids and consists of a signal peptide (amino acids 1-13) located at the N-terminus, the S1 subunit (14-685 residues), and the S2 subunit (686-1273 residues); the last two regions are responsible for receptor binding and membrane fusion, respectively. The amino acid sequence is shown below.

MFVFLVLLPLVSSQCVNLTTRTQLPPAYTNSFTRGVYYPDKVFRSSVLHS
TQDLFLPFFSNVTWFHAIHVSGTNGTKRFDNPVLPFNDGVYFASTEKSNI
IRGWIFGTTLDSKTQSLLIVNNATNVVIKVCEFQFCNDPFLGVYYHKNNK
SWMESEFRVYSSANNCTFEYVSQPFLMDLEGKQGNFKNLREFVFKNIDGY
FKIYSKHTPINLVRDLPQGFSALEPLVDLPIGINITRFQTLLALHRSYLT
PGDSSSGWTAGAAAYYVGYLQPRTFLLKYNENGTITDAVDCALDPLSETK
CTLKSFTVEKGIYQTSNFRVQPTESIVRFPNITNLCPFGEVFNATRFASV
YAWNRKRISNCVADYSVLYNSASFSTFKCYGVSPTKLNDLCFTNVYADSF
VIRGDEVRQIAPGQTGKIADYNYKLPDDFTGCVIAWNSNNLDSKVGGNYN
YLYRLFRKSNLKPFERDISTEIYQAGSTPCNGVEGFNCYFPLQSYGFQPT
NGVGYQPYRVVVLSFELLHAPATVCGPKKSTNLVKNKCVNFNFNGLTGTG
VLTESNKKFLPFQQFGRDIADTTDAVRDPQTLEILDITPCSFGGVSVITP
GTNTSNQVAVLYQDVNCTEVPVAIHADQLTPTWRVYSTGSNVFQTRAGCL
IGAEHVNNSYECDIPIGAGICASYQTQTNSPRRARSVASQSIIAYTMSLG
AENSVAYSNNSIAIPTNFTISVTTEILPVSMTKTSVDCTMYICGDSTECS
NLLLQYGSFCTQLNRALTGIAVEQDKNTQEVFAQVKQIYKTPPIKDFGGF
NFSQILPDPSKPSKRSFIEDLLFNKVTLADAGFIKQYGDCLGDIAARDLI
CAQKFNGLTVLPPLLTDEMIAQYTSALLAGTITSGWTFGAGAALQIPFAM
QMAYRFNGIGVTQNVLYENQKLIANQFNSAIGKIQDSLSSTASALGKLQD
VVNQNAQALNTLVKQLSSNFGAISSVLNDILSRLDKVEAEVQIDRLITGR
LQSLQTYVTQQLIRAAEIRASANLAATKMSECVLGQSKRVDFCGKGYHLM
SFPQSAPHGVVFLHVTYVPAQEKNFTTAPAICHDGKAHFPREGVFVSNGT
HWFVTQRNFYEPQIITTDNTFVSGNCDVVIGIVNNTVYDPLQPELDSFKE
ELDKYFKNHTSPDVDLGDISGINASVVNIQKEIDRLNEVAKNLNESLIDL
QELGKYEQYIKWPWYIWLGFIAGLIAIVMVTIMLCCMTSCCSCLKGCCSC
GSCCKFDEDDSEPVLKGVKLHYT (SEQ ID NO: 18)

[0120] Specific domains of the coronavirus spike protein that are particularly useful as an antigenic coronavirus peptide in the disclosed fusion proteins are:
[0121] a receptor-binding domain (RBD) of a coronavirus, or a fragment or variant thereof,
[0122] an N-terminal domain (NTD) of a coronavirus, or a fragment or variant thereof,
[0123] a receptor-binding domain (RBD)-N-terminal domain chimera of a coronavirus, or a fragment or variant thereof,
[0124] an S1 domain of a coronavirus, or a fragment or variant thereof,
[0125] a stabilized extracellular spike S-2P domain of a coronavirus, or a fragment or variant thereof,
[0126] a stabilized extracellular spike S domain of a coronavirus, or a fragment or variant thereof, or
[0127] a stabilized extracellular spike S-trimer of a coronavirus, or a fragment or variant thereof.

[0128] Thus, the antigenic coronavirus peptide may comprise an RBD. An RBD may comprise the SARS-CoV-2 RBD amino acid sequence set forth below:

NITNLCPFGEVFNATRFASVYAWNRKRISNCVADYSVLYNSASFSTFKCY
GVSPTKLNDLCFTNVYADSFVIRGDEVRQIAPGQTGKIADYNYKLPDDFT
GCVIAWNSNNLDSKVGGNYNYLYRLFRKSNLKPFERDISTEIYQAGSTPC
NGVEGFNCYFPLQSYGFQPTNGVGYQPYRVVVLSFELLHAPATVCGP (S
EQ ID NO: 19).

In some embodiments, the antigenic coronavirus peptide comprises a variant of SEQ ID NO: 19 that may comprise 1, 2, 3, 4, 5, 6, 7, 8, 9, 10, 11, 12, 13, 14, or 15 or more substitution, deletion, or insertion mutations in SEQ ID NO: 19. In some embodiments, the antigenic coronavirus peptide comprises a variant of SEQ ID NO: 19 that may comprise an amino acid sequence that shares about 80%, about 81%, about 82%, about 83%, about 84%, about 85%, about 86%, about 87%, about 88%, about 89%, about 90%, about 91%, about 92%, about 93%, about 94%, about 95%, about 96%, about 97%, about 98%, about 99%, or up to 100% sequence identity or homology with SEQ ID NO: 19. In some embodiments, the antigenic coronavirus peptide comprises a fragment of RBD that may be a fragment of SEQ ID NO: 19 that comprises about 20%, about 25%, about 30%, about 35%, about 40%, about 45%, about 50%, about 55%, about 60%, about 65%, about 70%, about 75%, about 80%, about 85%, about 90%, 91%, 92%, 93%, 94%, 95%, 96%, 97%, 98%, or 99% of the length of SEQ ID NO: 19, so long as the fragment is able to elicit an immune response (i.e., it is an antigenic fragment).

[0129] The antigenic coronavirus peptide may comprise a variant of an RBD (e.g., SEQ ID NO: 19) with one or more specific modifications made to reduce “sticky” hydrophobic regions, which may increase expression and/or the ability to form nanoparticles, for example, one of more of the following modifications.

TABLE 2

Exemplary Amino Acid Modifications in SARS-CoV-2 RBD

| Mutation (Location corresponds to location in full length spike; SEQ ID NO: 18) | Corresponding mutation location in SEQ ID NO: 19 | Location and Concept |
|---|---|---|
| F456N/K458T | 126/128 | glycan-ACE2BS |
| L455R+Y449K+F490R | 125+119+160 | ACE2BS |
| L455R | 125 | ACE2BS |
| I468R | 138 | ACE2BS |
| Y453R | 123 | ACE2BS |
| L452R | 122 | ACE2BS |
| L492R | 162 | ACE2BS |
| F490R | 160 | ACE2BS |
| F490A | 160 | ACE2BS |
| 517LLH to 517NKS | 187 | glycan- at the bottom hydrophobic patch |
| L518R | 188 | bottom hydrophobic patch |
| V367T+L335N | 37+5 | bottom greasy areas |
| T385N/L387T | 55/57 | glycan-lower hydrophobic patch (not the one already covered by a glycan) |
| V382R | 52 | lower hydrophobic patch (not the one already covered by a glycan) |
| F377R | 47 | lower hydrophobic patch (not the one already covered by a glycan) |
| K417N | 87 | RBD mutation alters antigenicity |
| E484K | 154 | RBD mutation alters antigenicity |
| N501Y | 171 | RBD mutation alters antigenicity |
| K417T/E484K/N501Y | 87/154/171 | Match to variant B.1.351 |

[0130] The foregoing modifications may increase the expression and/or nanoparticle formation of fusion proteins comprising an RBD with these modifications. The structure of the SARS-CoV-2 RBD is shown in a ribbon representation with specific residues that may be modified labeled in FIG. 4. The electrostatic potential of SARS-CoV-2 with a hydrophobic can be modified for improved production, stability and yield of the RBD or RBD-Ferritin constructs (see FIG. 50 for a space-filled model showing hydrophobic regions). FIG. 5 further shows variant mutations in the crystal structure of the RBD used to design exemplary ferritin variants with the foregoing modifications.

[0131] Additionally or alternatively, with respect to the modifications above, SEQ ID NOs: 308-312, which are also disclosed in Table 20 at the end of the specification, are examples of RBD with mutations at positions that are present in SARS-CopV-2 variants of concern (VOC), including strains B.1.351, B.1.1.7 and P.1, and these sequences include mutations at positions 417, 484, and/or 501 of the SARS-CoV-2 Spike protein. DNA sequences (e.g., plasmids) encoding these VOCs (and/or other coronavirus RBDs, such as SEQ ID NO: 19) can also be used to prime the immune response in a subject prior to administration of a nanoparticle vaccine disclosed herein.

[0132] Additionally or alternatively, the antigenic coronavirus peptide may comprise an NTD. An NTD may comprise the SARS-CoV-2 NTD amino acid sequence

QCVNLTTRTQLPPAYTNSFTRGVYYPDKVFRSSVLHSTQDLFLPFFSNVT
WFHAIHVSGTNGTKRFDNPVLPFNDGVYFASTEKSNIIRGWIFGTTLDSK
TQSLLIVNNATNVVIKVCEFQFCNDPFLGVYYHKNNKSWMESEFRVYSSA
NNCTFEYVSQPFLMDLEGKQGNFKNLREFVFKNIDGYFKIYSKHTPINLV
RDLPQGFSALEPLVDLPIGINITRFQTLLALHRSYLTPGDSSSGWTAGAA
AYYVGYLQPRTFLLKYNENGTITDAVDCALDPLSETKCTL

(SEQ ID NO:20). In some embodiments, the antigenic coronavirus peptide comprises a variant of SEQ ID NO: 20 that may comprise 1, 2, 3, 4, 5, 6, 7, 8, 9, 10, 11, 12, 13, 14, or 15 or more substitution, deletion, or insertion mutations in SEQ ID NO: 20. In some embodiments, the antigenic coronavirus peptide comprises a variant of SEQ ID NO: 20 that may comprise an amino acid sequence that shares about 80%, about 81%, about 82%, about 83%, about 84%, about 85%, about 86%, about 87%, about 88%, about 89%, about 90%, about 91%, about 92%, about 93%, about 94%, about 95%, about 96%, about 97%, about 98%, about 99%, or up to 100% sequence identity or homology with SEQ ID NO: 20. In some embodiments, the antigenic coronavirus peptide comprises a fragment of NTD that may be a fragment of SEQ ID NO: 20 that comprises about 20%, about 25%, about 30%, about 35%, about 40%, about 45%, about 50%, about 55%, about 60%, about 65%, about 70%, about 75%, about 80%, about 85%, about 90%, 91%, 92%, 93%, 94%, 95%, 96%, 97%, 98%, or 99% of the length of SEQ ID NO: 20, so long as the fragment is able to elicit an immune response (i.e., it is an antigenic fragment).

[0133] Additionally or alternatively, the antigenic coronavirus peptide may comprise an S1 protein sequence. An S1 protein sequence may comprise a SARS-CoV-2 S1 protein amino acid sequence

VNLTTRTQLPPAYTNSFTRGVYYPDKVFRSSVLHSTQDLFLPFFSNVTWF
HAIHVSGTNGTKRFDNPVLPFNDGVYFASTEKSNIIRGWIFGTTLDSKTQ
SLLIVNNATNVVIKVCEFQFCNDPFLGVYYHKNNKSWMESEFRVYSSANN
CTFEYVSQPFLMDLEGKQGNFKNLREFVFKNIDGYFKIYSKHTPINLVRD
LPQGFSALEPLVDLPIGINITRFQTLLALHRSYLTPGDSSSGWTAGAAAY
YVGYLQPRTFLLKYNENGTITDAVDCALDPLSETKCTLKSFTVEKGIYQT
SNFRVQPTESIVRFPNITNLCPFGEVFNATRFASVYAWNRKRISNCVADY
SVLYNSASFSTFKCYGVSPTKLNDLCFTNVYADSFVIRGDEVRQIAPGQT
GKIADYNYKLPDDFTGCVIAWNSNNLDSKVGGNYNYLYRLFRKSNLKPFE
RDISTEIYQAGSTPCNGVEGFNCYFPLQSYGFQPTNGVGYQPYRVVVLSF
ELLHAPATVCGPKKSTNLVKNKCVNFNFNGLTGTGVLTESNKKFLPFQQF
GRDIADTTDAVRDPQTLEILDITPCSFGGVSVITPGTNTSNQVAVLYQDV
NCTEVPVAIHADQLTPTWRVYSTGSNVFQTRAGCLIGAEHVNNSYECDIP
IGAGICASYQTQT (SEQ ID NO: 21)

or

QCVNLTTRTQLPPAYTNSFTRGVYYPDKVFRSSVLHSTQDLFLPFFSNVT
WFHAIHVSGTNGTKRFDNPVLPFNDGVYFASTEKSNIIRGWIFGTTLDSK
TQSLLIVNNATNVVIKVCEFQFCNDPFLGVYYHKNNKSWMESEFRVYSSA
NNCTFEYVSQPFLMDLEGKQGNFKNLREFVFKNIDGYFKIYSKHTPINLV
RDLPQGFSALEPLVDLPIGINITRFQTLLALHRSYLTPGDSSSGWTAGAA
AYYVGYLQPRTFLLKYNENGTITDAVDCALDPLSETKCTLKSFTVEKGIY
QTSNFRVQPTESIVRFPNITNLCPFGEVFNATRFASVYAWNRKRISNCVA
DYSVLYNSASFSTFKCYGVSPTKLNDLCFTNVYADSFVIRGDEVRQIAPG
QTGKIADYNYKLPDDFTGCVIAWNSNNLDSKVGGNYNYLYRLFRKSNLKP
FERDISTEIYQAGSTPCNGVEGFNCYFPLQSYGFQPTNGVGYQPYRVVVL
SFELLHAPATVCGPKKSTNLVKNKCVNFNFNGLTGTGVLTESNKKFLPFQ
QFGRDIADTTDAVRDPQTLEILDITPCSFGGVSVITPGTNTSNQVAVLYQ
DVNCTEVPVAIHADQLTPTWRVYSTGSNVFQTRAGCLIGAEHVNNSYECD
IPIGAGICASYQTQTNSPRRAR (SEQ ID NO: 22)

or

SSQCVNLTTRTQLPPAYTNSFTRGVYYPDKVFRSSVLHSTQDLFLPFFSN
VTWFHAIHVSGTNGTKRFDNPVLPFNDGVYFASTEKSNIIRGWIFGTTLD
SKTQSLLIVNNATNVVIKVCEFQFCNDPFLGVYYHKNNKSWMESEFRVYS
SANNCTFEYVSQPFLMDLEGKQGNFKNLREFVFKNIDGYFKIYSKHTPIN
LVRDLPQGFSALEPLVDLPIGINITRFQTLLALHRSYLTPGDSSSGWTAG
AAAYYVGYLQPRTFLLKYNENGTITDAVDCALDPLSETKCTLKSFTVEKG
IYQTSNFRVQPTESIVRFPNITNLCPFGEVFNATRFASVYAWNRKRISNC
VADYSVLYNSASFSTFKCYGVSPTKLNDLCFTNVYADSFVIRGDEVRQIA
PGQTGKIADYNYKLPDDFTGCVIAWNSNNLDSKVGGNYNYLYRLFRKSNL
KPFERDISTEIYQAGSTPCNGVEGFNCYFPLQSYGFQPTNGVGYQPYRVV
VLSFELLHAPATVCGPKKSTNLVKNKCVNFNFNGLTGTGVLTESNKKFLP
FQQFGRDIADTTDAVRDPQTLEILDITPCSFGGVSVITPGTNTSNQVAVL
YQDVNCTEVPVAIHADQLTPTWRVYSTGSNVFQTRAGCLIGAEHVNNSYE
CDIPIGAGICASYQTGGSQSIIAYT (SEQ ID NO: 313)

In some embodiments, the antigenic coronavirus peptide may comprise a variant of SEQ ID NO: 21, SEQ ID NO: 22, or SEQ ID NO: 313 that may comprise 1, 2, 3, 4, 5, 6, 7, 8, 9, 10, 11, 12, 13, 14, or 15 or more substitution, deletion, or insertion mutations in SEQ ID NO: 21, SEQ ID NO: 22, or SEQ ID NO: 313. In some embodiments, the antigenic coronavirus peptide may comprise a variant of SEQ ID NO: 21, SEQ ID NO: 22, or SEQ ID NO: 313 that may comprise an amino acid sequence that shares about 80%, about 81%, about 82%, about 83%, about 84%, about 85%, about 86%, about 87%, about 88%, about 89%, about 90%, about 91%, about 92%, about 93%, about 94%, about 95%, about 96%, about 97%, about 98%, about 99%, or up to 100% sequence identity or homology with SEQ ID NO: 21, SEQ ID NO: 22, or SEQ ID NO: 313. In some embodiments, the antigenic coronavirus peptide may comprise a fragment of S1 that may be a fragment of SEQ ID NO: 21, SEQ ID NO: 22, or SEQ ID NO: 313 that comprises about 20%, about 25%, about 30%, about 35%, about 40%, about 45%, about 50%, about 55%, about 60%, about 65%, about 70%, about 75%, about 80%, about 85%, about 90%, 91%, 92%, 93%, 94%, 95%, 96%, 97%, 98%, or 99% of the length of SEQ ID NO: 21, SEQ ID NO: 22, or SEQ ID NO: 313, so long as the fragment is able to elicit an immune response (i.e., it is an antigenic fragment).

[0134] Additionally or alternatively, the antigenic coronavirus peptide may comprise an S-2P sequence or a fragment or variant thereof. An S-2P sequence is a stabilized version of the spike ectodomain that includes two proline substitutions and stabilizes the prefusion conformation. Specifically, S-2P comprises proline modifications K986P and V987P, as well as the removal of the Furin cleavage site (RRAS to GSAS). In some embodiments, the antigenic coronavirus peptide may comprise a variant of the S-2P sequence that may comprise 1, 2, 3, 4, 5, 6, 7, 8, 9, 10, 11, 12, 13, 14, or 15 or more substitution, deletion, or insertion mutations in the S-2P sequence. In some embodiments, the antigenic coronavirus peptide may comprise a variant of the S-2P sequence that may comprise an amino acid sequence that shares about 80%, about 81%, about 82%, about 83%, about 84%, about 85%, about 86%, about 87%, about 88%, about 89%, about 90%, about 91%, about 92%, about 93%, about 94%, about 95%, about 96%, about 97%, about 98%, about 99%, or up to 100% sequence identity or homology with a stabilized S-2P. In some embodiments, the antigenic coronavirus peptide may comprise a fragment of S-2P that comprises about 20%, about 25%, about 30%, about 35%, about 40%, about 45%, about 50%, about 55%, about 60%, about 65%, about 70%, about 75%, about 80%, about 85%, about 90%, 91%, 92%, 93%, 94%, 95%, 96%, 97%, 98%, or 99% of the stabilized S-2P, so long as the fragment is able to elicit an immune response (i.e., it is an antigenic fragment).

[0135] Additionally or alternatively, the antigenic coronavirus peptide may comprise an extracellular spike S domain (e.g., a stabilized extracellular spike S domain) or a fragment or variant thereof. A stabilized extracellular spike S domain may comprise one or more modifications to stabilize the refusion conformation of the extracellular domain. In some embodiments, the antigenic coronavirus peptide may comprise a stabilized extracellular spike S domain that comprises 1, 2, 3, 4, 5, 6, 7, 8, 9, 10, 11, 12, 13, 14, or 15 or more substitution, deletion, or insertion mutations in an extracellular spike S domain. In some embodiments, the antigenic coronavirus peptide may comprise a stabilized extracellular spike S domain that comprises an amino acid sequence that shares about 80%, about 81%, about 82%, about 83%, about 84%, about 85%, about 86%, about 87%, about 88%, about 89%, about 90%, about 91%, about 92%, about 93%, about 94%, about 95%, about 96%, about 97%, about 98%, about 99%, or up to 100% sequence identity or homology with an extracellular spike S domain. In some embodiments, the antigenic coronavirus peptide may comprise a fragment of the extracellular spike S domain (e.g., a fragment of a stabilized extracellular spike S domain) that comprises about 20%, about 25%, about 30%, about 35%, about 40%, about 45%, about 50%, about 55%, about 60%, about 65%, about 70%, about 75%, about 80%, about 85%, about 90%, 91%, 92%, 93%, 94%, 95%, 96%, 97%, 98%, or 99% of extracellular spike S domain (e.g., a stabilized extracellular spike S domain), so long as the fragment is able to elicit an immune response (i.e., it is an antigenic fragment).

[0136] Additionally or alternatively, the antigenic coronavirus peptide may comprise an extracellular spike S trimer (e.g., a stabilized extracellular spike S trimer) or a fragment or variant thereof. A stabilized extracellular spike S trimer may comprise one or more modifications to stabilize the refusion conformation of the extracellular trimer. In some embodiments, the antigenic coronavirus peptide may comprise a stabilized extracellular spike S trimer that comprises 1, 2, 3, 4, 5, 6, 7, 8, 9, 10, 11, 12, 13, 14, or 15 or more substitution, deletion, or insertion mutations in an extracellular spike S trimer. In some embodiments, the antigenic coronavirus peptide may comprise a stabilized extracellular spike S trimer that comprises an amino acid sequence that shares about 80%, about 81%, about 82%, about 83%, about 84%, about 85%, about 86%, about 87%, about 88%, about 89%, about 90%, about 91%, about 92%, about 93%, about 94%, about 95%, about 96%, about 97%, about 98%, about 99%, or up to 100% sequence identity or homology with an extracellular spike S trimer. In some embodiments, the antigenic coronavirus peptide may comprise a fragment of the extracellular spike S trimer (e.g., a fragment of a stabilized extracellular spike S trimer) that comprises about 20%, about 25%, about 30%, about 35%, about 40%, about 45%, about 50%, about 55%, about 60%, about 65%, about 70%, about 75%, about 80%, about 85%, about 90%, 91%, 92%, 93%, 94%, 95%, 96%, 97%, 98%, or 99% of extracellular spike S trimer (e.g., a stabilized extracellular spike S trimer), so long as the fragment is able to elicit an immune response (i.e., it is an antigenic fragment).

[0137] Additionally or alternatively, the antigenic coronavirus peptide may comprise a stabilized variant with six prolines (i.e., “Hexapro”), which is another variant of the spike protein that comprises F817P, A892P, A899P, and A942P substitutions in addition to the two proline substitutions of S-2P. In some embodiments, the antigenic coronavirus peptide may comprise a variant of Hexapro that may comprise 1, 2, 3, 4, 5, 6, 7, 8, 9, 10, 11, 12, 13, 14, or 15 or more substitution, deletion, or insertion mutations in a Hexapro. In some embodiments, the antigenic coronavirus peptide may comprise a variant of Hexapro that may comprise an amino acid sequence that shares about 80%, about 81%, about 82%, about 83%, about 84%, about 85%, about 86%, about 87%, about 88%, about 89%, about 90%, about 91%, about 92%, about 93%, about 94%, about 95%, about 96%, about 97%, about 98%, about 99%, or up to 100% sequence identity or homology with a Hexapro. In some embodiments, the antigenic coronavirus peptide may comprise a fragment of Hexapro that comprises about 20%, about 25%, about 30%, about 35%, about 40%, about 45%, about 50%, about 55%, about 60%, about 65%, about 70%, about 75%, about 80%, about 85%, about 90%, 91%, 92%, 93%, 94%, 95%, 96%, 97%, 98%, or 99% of the Hexapro, so long as the fragment is able to elicit an immune response (i.e., it is an antigenic fragment).

[0138] Additionally or alternatively, the antigenic coronavirus peptide may comprise a SARS-CoV-1 spike protein (S protein) or a fragment or variant thereof. The SARS-CoV-1 spike protein may comprise the amino acid sequence set forth below:

SDLDRCTTFDDVQAPNYTQHTSSMRGVYYPDEIFRSDTLYLTQDLFLPFY
SNVTGFHTINHTFGNPVIPFKDGIYFAATEKSNVVRGWVFGSTMNNKSQS
VIIINNSTNVVIRACNFELCDNPFFAVSKPMGTQTHTMIFDNAFNCTFEY
ISDAFSLDVSEKSGNFKHLREFVFKNKDGFLYVYKGYQPIDVVRDLPSGF
NTLKPIFKLPLGINITNFRAILTAFSPAQDIWGTSAAAYFVGYLKPTTFM
LKYDENGTITDAVDCSQNPLAELKCSVKSFEIDKGIYQTSNFRVVPSGDV
VRFPNITNLCPFGEVFNATKFPSVYAWERKKISNCVADYSVLYNSTFFST
FKCYGVSATKLNDLCFSNVYADSFVVKGDDVRQIAPGQTGVIADYNYKLP
DDFMGCVLAWNTRNIDATSTGNYNYKYRYLRHGKLRPFERDISNVPFSPD
GKPCTPPALNCYWPLNDYGFYTTTGIGYQPYRVVVLSFELLNAPATVCGP
KLSTDLIKNQCVNFNFNGLTGTGVLTPSSKRFQPFQQFGRDVSDFTDSVR
DPKTSEILDISPCAFGGVSVITPGTNASSEVAVLYQDVNCTDVSTAIHAD
QLTPAWRIYSTGNNVFQTQAGCLIGAEHVDTSYECDIPIGAGICASYHTV
SLLRSTSQKSIVAYTMSLGADSSIAYSNNTIAIPTNFSISITTEVMPVSM
AKTSVDCNMYICGDSTECANLLLQYGSFCTQLNRALSGIAAEQDRNTREV
FAQVKQMYKTPTLKYFGGFNFSQILPDPLKPTKRSFIEDLLFNKVTLADA
GFMKQYGECLGDINARDLICAQKFNGLTVLPPLLTDDMIAAYTAALVSGT
ATAGWTFGAGAALQIPFAMQMAYRFNGIGVTQNVLYENQKQIANQFNKAI
SQIQESLTTTSTALGKLQDVVNQNAQALNTLVKQLSSNFGAISSVLNDIL
SRLDPPEAEVQIDRLITGRLQSLQTYVTQQLIRAAEIRASANLAATKMSE
CVLGQSKRVDFCGKGYHLMSFPQAAPHGVVFLHVTYVPSQERNFTTAPAI
CHEGKAYFPREGVFVFNGTSWFITQRNFFSPQIITTDNTFVSGNCDVVIG
IINNTVYDPLQSELDSIKEELDKIHKN

(SEQ ID NO: 314). In some embodiments, the antigenic coronavirus peptide comprises a variant of SEQ ID NO: 314 that may comprise 1, 2, 3, 4, 5, 6, 7, 8, 9, 10, 11, 12, 13, 14, or 15 or more substitution, deletion, or insertion mutations in SEQ ID NO: 314. In some embodiments, the antigenic coronavirus peptide comprises a variant of SEQ ID NO: 314 that may comprise an amino acid sequence that shares about 80%, about 81%, about 82%, about 83%, about 84%, about 85%, about 86%, about 87%, about 88%, about 89%, about 90%, about 91%, about 92%, about 93%, about 94%, about 95%, about 96%, about 97%, about 98%, about 99%, or up to 100% sequence identity or homology with SEQ ID NO: 314. In some embodiments, the antigenic coronavirus peptide comprises a fragment of a SARS-CoV-1 spike protein that may be a fragment of SEQ ID NO: 314 that comprises about 20%, about 25%, about 30%, about 35%, about 40%, about 45%, about 50%, about 55%, about 60%, about 65%, about 70%, about 75%, about 80%, about 85%, about 90%, 91%, 92%, 93%, 94%, 95%, 96%, 97%, 98%, or 99% of the length of SEQ ID NO: 314, so long as the fragment is able to elicit an immune response (i.e., it is an antigenic fragment).

### D. Fusion Proteins and Vaccine Nanoparticles

[0139] The disclosed vaccine nanoparticles are made up of a plurality of fusion proteins that self-assemble into a nanoparticle. As noted above, the fusion proteins comprise a nanoparticle-forming peptide, which may be an H. pylori ferritin protein or a fragment or variant thereof. Ferritin is a naturally occurring protein that self-assembles into a 24-member spherical particle, made up of multiple three-fold, four-fold, and/or two-fold axes. Thus, the nanoparticle may comprise a 3-fold axis, a 4-fold axis, or a 2-fold axis. Using the 3-fold axes, 8 antigenic trimeric coronavirus peptides can be presented on the surface of the self-assembling protein nanoparticle surface. In the case of monomeric antigens such as the RBD, 24 coronavirus peptides can be presented on the surface of the self-assembling protein nanoparticle surface. Space-filling models of exemplary Spike Ferritin nanoparticles comprising a 4-fold axis and a 3-fold axis are shown in FIG. 1B (see also FIG. 51), and other SARS-CoV-2 Ferritin nanoparticles are shown in FIG. 1.

[0140] The antigenic coronavirus peptide component of the disclosed fusion proteins may comprise 1, 2, or 3 or more distinct domains or parts, which may be selected from the exemplary antigenic peptides discussed above. Typically, but not exclusively, a vaccine against a given coronavirus will include antigenic peptides of that coronavirus. For example, typically, but not exclusively, a vaccine against SARS-CoV-2 will include antigenic peptides from SARS-CoV-2, and typically, but not exclusively, a vaccine against SARS-CoV-1 will include antigenic peptides from SARS-CoV-1 (etc.). For example, in some embodiments the antigenic coronavirus peptide my comprise a single domain selected from a RBD, a NTD, a full spike protein, an S1 subunit, an S2 subunit, a stabilized extracellular spike S-2P domain, a stabilized extracellular spike S domain, a stabilized extracellular spike S-trimer, and variants or fragments thereof. Alternatively, the antigenic coronavirus peptide my comprise a combination of two domains, such as two domains selected from a RBD, a NTD, a full spike protein, an S1 subunit, an S2 subunit, a stabilized extracellular spike S-2P domain, a stabilized extracellular spike S domain, a stabilized extracellular spike S-trimer, a Hexapro, and variants or fragments thereof. Alternatively, the antigenic coronavirus peptide my comprise a combination of three domains, such as three domains selected from a RBD, a NTD, a full spike protein, an S1 subunit, an S2 subunit, a stabilized extracellular spike S-2P domain, a stabilized extracellular spike S domain, a stabilized extracellular spike S-trimer, a Hexapro, and variants or fragments thereof.

[0141] Exemplary fusion proteins include, but are not limited to, a fusion protein comprising (1) a RBD and ferritin, (2) a NTD and ferritin, (3) S1 and ferritin, (4) RBD-NTD and ferritin, and (5) a stabilized prefusion S trimer and ferritin. Ribbon and space-filled representations of these exemplary fusion proteins and the particles that they form are provided in FIGS. 1 and 2 (see also FIG. 52). Sequence information related to the stabilized coiled-coil region and linker sequence for select stabilized prefusion S trimer-Ferritin constructs are provided in FIG. 3 The following Table 3 discloses exemplary vaccine particles that fall into each of the foregoing five categories, and the sequences of exemplary fusion proteins making up each of these particles and others are provided in Table 18 at the end of the specification.

TABLE 3

Exemplary Nanoparticles

| | | | | | |
|---|---|---|---|---|---|
| RBD-Ferritin | NTD-Ferritin | S1-Ferritin | RBD-NTD-Ferritin | S Trimer-Ferritin | |
| pCoV50 | pCoV65 | pCoV111 | pCoV122 | pCoV1B-01 | pCoV186 |
| pCoV58 | pCoV23 | pCoV109 | pCoV125 | pCoV1B-02 | pCoV187 |
| pCoV59 | | pCoV110 | pCoV146 | pCoV1B-03 | pCoV1B-08 |
| pCoV127 | | pCoV112 | pCoV147 | pCoV1B-04 | pCoV1B-09 |
| pCoV129 | | | | pCoV1B-05 | pCoV1B-10 |
| pCoV130 | | | | pCoV1B-06 (SpFN_1B-06) | pCoV1B-11 |
| pCoV131 | | | | pCoV1B-07 | pCoV1B-01-PL-KV |

[0142] Biochemical and biophysical characterization of select nanoparticles are shown in FIGS. 6-10 including size-exclusion profiles, expression levels, SDS-PAGE, dynamic light scattering and negative-stain transmission electron microscopy.

[0143] Negative-stain electron microscopy 3-dimernsional reconstructions for select nanoparticles are shown in FIG. 11. TEM images of select nanoparticles are shown in FIG. 53.

[0144] Nanoparticles as disclosed herein may bind to a human ACE-2 receptor. Nanoparticles as disclosed herein may bind to anti-coronavirus spike protein antibodies including, but not limited to, CR3022.

[0145] The disclosed fusion proteins that self-assemble into the disclosed nanoparticles, including the nanoparticles described in Table 3 above and the fusion protein disclosed in Table 18 below, can be expressed alone or co-expressed (e.g., on two different plasmids) in suitable expression systems, which may include mammalian or eukaryotic expression systems. Some of the fusion proteins disclosed in Table 18 may comprise a histidine tag (i.e., His tag), which comprises a repeat of 5-10 histidine (H) residues or other tag sequences that may be useful in processing or purifying the protein, but which may ultimately be cleaved from the active protein before nanoparticle assembly. For example, pCoV223 (SEQ ID NO: 301) encodes a sequence with a N-terminal His-tag to allow purification of the Spike-Ferritin molecule.

[0146] All of the proteins disclosed in Table 18 are exemplary nanoparticle-forming proteins that can form Spike-Ferritin nanoparticles. With respect to SEQ ID NOs: 284-301, which are disclosed in Table 18, these sequences contain a set of alternate sequences to improve the stability and immunogenicity of the Spike-Ferritin constructs. This includes a stabilizing disulfide bond, a D614G mutation, a mutation to remove a glycan in the Spike at N165 to enable the RBD greater freedom of motion and allow the RBD to sit in the “up” and more exposed conformation, and a N234Q mutation to remove a glycan at 234 in the Spike to allow the RBD to sit in a more closed conformation. Additionally or alternatively a glycan at N146 or N77 in the Ferritin sequence will improve and stabilize the Ferritin molecule.

[0147] SEQ ID NOs: 302 -307, which are also disclosed in Table 18, are examples of nanoparticles that comprise multiple RBDs connected to a single ferritin molecule contained within a single construct (see, e.g., FIG. 54). The RBDs are arranged analogously to “beads on a string,” which allows multiple antigenic components to be assembled using a single gene insert for production. This concept builds on the results seen with the RBD-NTD-Ferritin constructs (e.g., FIG. 52) such as pCoV146 (SEQ ID NO: 136) where a RBD and NTD are attached sequentially in tandem to a ferritin molecule to allow simple expression of both components.

[0148] The “beads on a string” concept can be used to create a nanoparticle with antigenic components from multiple coronaviruses such as SARS-CoV-2, SARS-CoV-1, HKU-1, MERS-CoV, 229E, NL63, OC43, or related coronaviruses including those identified from bats, camels, or pangolins. These embodiments can be utilized to create a pan-β-coronavirus vaccine, or pan-coronavirus vaccine. For example, multiple RBD “beads” comprised of different antigenic sequences can be provided together on a single “string” (i.e., in a single construct) to elicit broad immune responses against coronaviruses. For example, a “string” of antigens such as SARS-CoV-2-RBD-SARS-CoV-1-RBD-HKU-1-RBD-MERS-CoV-RBD-229E-RBD-NL63-RBD could be used with a “string” of antigens such as SARS-CoV-2-RBD-pangolinSARS-CoV-1-RBD-OC43-RBD-camelMERS-CoV-RBD-229E-RBD-NL63-RBD to increase or focus the immune response to a specific pan-reactive or pan-protective immunity. The “beads on a string” may comprise, for example, 2-10 RBD sequences in series, or, in other words, may comprise 2, 3, 4, 5, 6, 7, 8, 9, or 10 RBDs. In accordance with these embodiments, RBD-Ferritin sequences, e.g., pCoV127 (SEQ ID NO: 125 or 194) or pCOV131 (SEQ ID NO: 129 or 198), may serve as a base sequence and additional RBD sequences can be added to the N-terminus. Alternatively, RBD-NTD-Ferritin sequences, e.g., pCoV146 (SEQ ID NO: 136), may serve as a base sequence and additional RBD sequences can be added to the N-terminus. A linker sequence, including but not limited to the linker sequences disclosed in Table 1, may link one or more or each of the RBD sequences in series.

[0149] Any of the fusion proteins, nanoparticles, and vaccines disclosed herein can be used for treating or preventing a coronavirus infection, such as SARS-CoV-2 infection (e.g., COVID-19) or SARS-CoV-1 infection, for example. Optimal doses and routes of administration may vary.

[0150] The disclosed fusion proteins and nanoparticles can be combined with an adjuvant to improve immune responses and promote protective responses, as discussed in more detail in the following section.

### E. Vaccine Adjuvant

[0151] An adjuvant is an ingredient used in some vaccines that helps create a stronger immune response in people receiving the vaccine. Adjuvants help the body to produce an immune response strong enough to protect the person from the disease he or she is being vaccinated against.

[0152] The present disclosure provides vaccine formulations that contain any of (or a combination of) the disclosed nanoparticles and at least one adjuvant selected from the group consisting of ALFQ, alhydrogel, and combination thereof.

[0153] The adjuvant ALFQ was developed by the U.S. Army, and is an Army-Liposome-Formulation (ALF) containing high amounts of cholesterol together with the QS21 saponin (ALFQ). ALFQ has been used in numerous animal studies and with a variety of immunogens, and has shown effectiveness in eliciting robust immune responses. In contrast to some adjuvants, ALFQ tends to elicit a balanced Th1/Th2 immune response avoiding a skewed immune response that has been implicated in vaccine associated enhanced respiratory disease (VAERD). In some embodiments, the ALFQ adjuvant is a liposomal formulation containing monophosphoryl lipid A (MPLA) and QS-21 saponin. In some embodiments, the ALFQ liposomes may contain about 600 µg/mL monophosphoryl 3-deacyl lipid A (3D-PHAD) and about 300 µg/mL QS-21. To make the ALFQ, in one exemplary embodiment, 14.7 mL of ALF55 (containing 1.236 mg/mL 3D-PHAD) may be diluted with 6.5 mL of isotonic Sorensen’s PBS pH 6.15 in a sterile glass vial and adding 9.08 mL of QS-21 (1 mg/mL) to the diluted ALF55 while slowly stirring.

[0154] Alhydrogel refers to a range of aluminum hydroxide gel products which have been specifically developed for use as an adjuvant in human and veterinary vaccines. The gel is a suspension of boehmite-like (aluminium oxyhydroxide) hydrated nano/micron size crystals in loose aggregates. The products have very low conductivity due to the absence of buffering ions. They have a positive charge at neutral pH and effectively adsorb negatively charged antigens. The primary purpose of the adjuvant in vaccines is to boost the antibody-mediated (Th2) immune response to the antigens. Alhydrogel products can be combined with other adjuvant types (such as monophosphoryl lipids) to achieve a balanced Th1/Th2 immune response. For the purposes of formulating the disclosed vaccines, an alhydrogel stock may be diluted before combining with the disclosed nanoparticles such that the concentration of the aluminum is about 500 µg/ml, about 550 µg/ml, about 600 µg/ml, about 650 µg/ml, about 700 µg/ml, about 750 µg/ml, about 800 µg/ml, about 850 µg/ml, about 900 µg/ml, about 950 µg/ml, about 1000 µg/ml, about 1050 µg/ml, about 1100 µg/ml, about 1150 µg/ml, about 1200 µg/ml, about 1250 µg/ml, about 1300 µg/ml, about 1350 µg/ml, about 1400 µg/ml, about 1450 µg/ml, or about 1500 µg/ml, or more.

[0155] Other vaccine adjuvants are known in the art, and based on the results reported herein with respect to ALFQ, and Alhydrogel, those of skill in the art will understand that other adjuvants also could be used with and complement the function of the disclosed nanoparticles. Other adjuvants that are suitable for use with the disclosed nanoparticles include, but are not limited to, monophosphoryl lipid A (MPLA), oil in water emulsions, ADJUPLEX™ (a lecithin and carbomer homopolymer), ADDAVAX™ (a squalene-based oil-in-water nano-emulsion), CARBOPOL® polymers (crosslinked polyacrylic acid polymers), Poly IC:LC (a synthetic complex of carboxymethylcellulose, polyinosinic-polycytidylic acid, and poly-L-lysine double-stranded RNA), PolyI:C (polyinosinic:polycytidylic acid), CpG oligodeoxynucleotides, Flagellin, Iscomatrix (comprised of saponin, cholesterol, and dipalmitoylphosphatidylcholine), virosomes, MF59 (a squalene-based oil-in-water emulsion), AS03 (a squalene-based oil-in-water emulsion), and AS04 (alum-absorbed 3-0-desacyl-4′-monophosphoryl lipid A), among others.

### F. Pharmaceutical Compositions

[0156] Pharmaceutical compositions of the present disclosure include vaccines comprising nanoparticles as disclosed herein. In general, the pharmaceutical compositions will also comprise an adjuvant (e.g., ALFQ, alhydrogel, or a combination thereof). The nanoparticle(s), alone or in combination with one or more adjuvants, may be formulated into a suitable carrier to form a pharmaceutical composition suitable for the intended route of administration.

[0157] In some embodiments, the pharmaceutical composition is formulated for systemic administration via parenteral delivery. Parenteral administration includes intravenous, intra-arterial, subcutaneous, intradermal, intraperitoneal, or intramuscular injection or infusion. Formulations for parenteral administration may include sterile aqueous solutions, which may also contain buffers, diluents and other pharmaceutically acceptable additives known to the skilled artisan. For intravenous use, the total concentration of solutes may be controlled to render the preparation isotonic. Intravenous, intra-arterial, subcutaneous, or intramuscular injection are preferred routes of administration. Additionally or alternatively, the disclosed vaccines can be formulated for intranasal administration or administration via contact with another mucosa membrane.

[0158] Pharmaceutical compositions for injection may be presented in unit dosage form, e.g., in ampules, or in multi-dose containers, optionally with an added preservative. The compositions may take such forms as suspensions, solutions or emulsions in oily or aqueous vehicles, and may contain formulatory agents such as suspending, stabilizing and/or dispersing agents. The disclosed vaccines may formulated using any suitable pharmaceutically acceptable excipients.

[0159] Pharmaceutical compositions for intranasal administration may take the form of liquid dispersions, suspensions, solutions, or emulsions and may be incorporated into a nasal aerosol or nasal spray. Such compositions may contain formulatory agents such as suspending, stabilizing and/or dispersing agents, and may formulated using any suitable pharmaceutically acceptable excipients. Intranasal administration includes administration via the nose, either with or without concomitant inhalation during administration. Such administration is typically through contact of a disclosed vaccine with the nasal mucosa, nasal turbinates, or sinus cavity. Administration by inhalation may comprise intranasal administration, or may include oral inhalation. Such administration may also include contact with the oral mucosa, bronchial mucosa, and other epithelia.

[0160] The disclosed vaccines may be formulated to be administered concurrently with another therapeutic agent. The vaccines may be formulated to be administered in sequence with another therapeutic agent. For example, the vaccine may be administered either before or after the subject has received a regimen of an anti-viral therapy.

[0161] Any of the pharmaceutical compositions disclosed herein can be used for treating or preventing a coronavirus infection, such as SARS-CoV-2 infection (e.g., COVID-19) or SARS-CoV-1 infection, for example. A pharmaceutical composition for use against a specific coronavirus infection (such as SARS-CoV-2), typically will include antigenic peptides of the target coronavirus (e.g., SARS-CoV-2), but optionally additionally or alternatively may include antigenic peptides of a closely related coronavirus (such as SARS-CoV-1). Optimal doses and routes of administration may vary.

### IV. Treatment and Prevention of Coronavirus Infection

[0162] The present disclosure provides methods of treatment and prevention of coronavirus infections, such as but not limited to SARS-CoV-2 infections (e.g., COVID-19) by administering a vaccine comprising one or more of the nanoparticles disclosed herein. The present disclosure also provides uses of the disclosed vaccines and pharmaceutical compositions for treating or preventing coronavirus infections, such as SARS-CoV-2 infections (e.g., COVID-19). In accordance with any methods and uses disclosed herein, the subject may be at risk of a coronavirus infection or may already be infected with a coronavirus. Methods targeting a specific coronavirus infection (such as SARS-CoV-2), typically will use a vaccine or pharmaceutical composition that includes antigenic peptides of the target coronavirus (e.g., SARS-CoV-2), but optionally additionally or alternatively may include antigenic peptides of a closely related coronavirus (such as SARS-CoV-1).

[0163] The disclosed methods comprise administering to a subject an effective amount of one or more of the vaccines or pharmaceutical compositions disclosed herein. Administration may be performed via intravenous, intra-arterial, intramuscular, subcutaneous, or intradermal injection. In some embodiments, the subject may be at risk of exposure to a coronavirus, such as SARS-CoV-2 or SARS-CoV-1, for example. In some embodiments, the subject may have previously been exposed to a coronavirus, such as SARS-CoV-2 or SARS-CoV-1. In some embodiments, the subject may have an active infection (e.g., COVID-19) which may be treated as a result of the administration. In some embodiments, the administration of the vaccine prevents the subject from developing a coronavirus infection (e.g., COVID-19). The methods can further include administration of a priming agent (i.e., “primer”) for the nanoparticle vaccine. The primer can be administered prior to the administration of the nanoparticle vaccine (e.g., 1 week, 2 weeks, 3 weeks, 4 weeks, 5 weeks, or 6 or more weeks prior) and the primer may comprise a nucleic acid (i.e., DNA or mRNA) that encodes a fusion protein or all, a fragment, or a variant of the RBD of a coronavirus S protein (e.g., the S protein of SARS-CoV-2 or SARS-CoV-1).

[0164] For the purposes of the disclosed methods and uses, treatment and/or prevention of infection by all strains and variants of SAR-CoV-2 are specifically contemplated, including treatment and/or prevention of B.1.1.7, B.1.351, and P1. Also contemplated are methods and uses for treatment and/or prevention of infection by all strains and variants of SARS-CoV-1, and all strains and variants of other coronaviruses disclosed herein.

[0165] Dosage regimens can be adjusted to provide the optimum desired response (e.g., production of antibodies and/or cytokines against a coronavirus such as SAR-CoV-2 or SARS-CoV-1, for example). For example, in some embodiments, a single bolus of vaccine may be administered, while in some embodiments, several doses may be administered over time, or the dose may be proportionally reduced or increased as indicated by the situation. For example, in some embodiments the disclosed vaccines may be administered once or twice weekly, once or twice monthly, once every week, once every other week, once every three weeks, once every four weeks, once every other month, once every three months, once every four months, once every five months, once every six months, once every seven weeks, once every eight weeks, once every three months, once every four months, once every five months, once every six months, or once a year. In some embodiments, a subject may be administered an initial dose and then receive one or more booster doses with a predefined span of time in between each dose (e.g., 1, 2, 3, or 4 weeks, or 1, 2, 3, 4, 5, 6, 9, or 12 months). In some embodiments, a subject may receive only a single dose. In some embodiments, a subject may receive an initial dose followed by one or more subsequent doses of an equal or lesser concentration at a set time after this initial dose, such as 1 week, 2 weeks, 3 weeks, 4 weeks, 5 weeks, 6 weeks, 7 weeks, 8 weeks, 9 weeks, 10 weeks, 11 weeks, 12 weeks, 13 weeks, 14 weeks, 15 weeks, 16 weeks, 17 weeks, 18 weeks, 19 weeks, or 20 or more weeks, such as 24 weeks, 52 weeks, 104 weeks, 260 weeks, or 520 weeks.

[0166] Doses may likewise by adjusted to provide the optimum desired response. For example, in some embodiments, a dose of the disclosed vaccines may comprise 1 µg to 50 mg of vaccine. A single does may comprise about 1 µg, about 5 µg, about 10 µg, about 15 µg, about 20 µg, about 25 µg, about 30 µg, about 35 µg, about 40 µg, about 45 µg, about 50 µg, about 55 µg, about 60 µg, about 65 µg about 70 µg, about 75 µg, about 80 µg, about 85 µg, about 90 µg, about 95 µg, about 100 µg, about 125 µg, about 150 µg, about 175 µg, about 200 µg, about 225 µg, about 250 µg, about 275 µg, about 300 µg, about 325 µg, about 350 µg, about 375 µg, about 400 µg, about 425 µg, about 450 µg, about 475 µg, about 500 µg, about 525 µg, about 550 µg, about 575 µg, about 600 µg, about 625 µg, about 650 µg, about 675 µg, about 700 µg, about 725 µg, about 750 µg, about 775 µg, about 100 µg, about 825 µg, about 850 µg, about 875 µg, about 900 µg, about 925 µg, about 950 µg, about 975 µg, about 1 mg, about 1.25 mg, about 1.5 mg, about 1.75 mg, about 2 mg, about 2.25 mg, about 2.5 mg, about 2.75 mg, about 3 mg, about 3.25 mg, about 3.5 mg, about 3.75 mg, about 4 mg, about 4.25 mg, about 4.5 mg, about 5.75 mg, about 5 mg, about 10 mg, about 15 mg, about 20 mg, about 25 mg, about 30 mg, about 35 mg, about 45 mg, or about 50 mg. In some embodiments, a single dose may comprise 4 mg or less of the vaccine or nanoparticle.

[0167] Alternatively, dosing may be based on the number of nanoparticles administered to a subject. For example, in some embodiments, a dose of the disclosed vaccines may comprise 1.0 × 10⁸ to 1.0 × 10¹² nanoparticles. For example, a single dose may comprise 1.0 × 10⁸, 1.5 × 10⁸, 2.0 × 10⁸, 2.5 × 10⁸, 3.0 × 10⁸, 3.5 × 10⁸, 4.0 × 10⁸, 4.5 × 10⁸, 5.0 × 10⁸, 5.5 × 10⁸, 6.0 × 10⁸, 6.5 × 10⁸, 7.0 × 10⁸, 7.5 × 10⁸, 8.0 × 10⁸, 8.5 × 10⁸, 9.0 × 10⁸, 9.5 × 10⁸, 1.0 × 10⁹, 1.5 × 10⁹, 2.0 × 10⁹, 2.5 × 10⁹, 3.0 × 10⁹, 3.5 × 10⁹, 4.0 × 10⁹, 4.5 × 10⁹, 5.0 × 10⁹, 5.5 × 10⁹, 6.0 × 10⁹, 6.5 × 10⁹, 7.0 × 10⁹, 7.5 × 10⁹, 8.0 × 10⁹, 8.5 × 10⁹, 9.0 × 10⁹, 9.5 × 10⁹, 1.0 × 10¹⁰, 1.5 × 10¹⁰, 2.0 × 10¹⁰, 2.5 × 10¹⁰, 3.0 × 10¹⁰, 3.5 × 10¹⁰, 4.0 × 10¹⁰, 4.5 × 10¹⁰, 5.0 × 10¹⁰, 5.5 × 10¹⁰, 6.0 × 10¹⁰, 6.5 × 10¹⁰, 7.0 × 10¹⁰, 7.5 × 10¹⁰, 8.0 × 10¹⁰, 8.5 × 10¹⁰, 9.0 × 10¹⁰, 9.5 × 10¹⁰, 10 × 10¹⁰, 1.0 × 10¹¹ 1.5 × 10¹¹, 2.0 × 10¹¹, 2.5 × 10¹¹, 3.0 × 10¹¹, 3.5 × 10¹¹, 4.0 × 10¹¹, 4.5 × 10¹¹, 5.0 × 10¹¹, 5.5 × 10¹¹, 6.0 × 10¹¹, 6.5 × 10¹¹, 7.0 × 10¹¹, 7.5 × 10¹¹, 8.0 × 10¹¹, 8.5 × 10¹¹, 9.0 × 10¹¹, 9.5 × 10¹¹, or 1.0 × 10¹² nanoparticles. In some embodiments, the dose may be about 9.5 × 10⁸, about 9.75 × 10⁸, about 9.85 × 10⁸, about 9.95 × 10⁸, about 1.0 × 10⁹, about 1.1 × 10⁹, about 1.15 × 10⁹, about 1.2 × 10⁹, about 1.25 × 10⁹, about 1.3 × 10⁹, about 1.35 × 10⁹, about 1.4 × 10⁹, about 1.45 × 10⁹, or about 1.5 × 10⁹ nanoparticles

[0168] In some embodiments, the subject is a mammal. In some embodiments, the subject is a human. In preferred embodiments in which the subject is a human, the subject may be at least 18 years old, 40 years old, at least 45 years old, at least 50 years old, at least 55 years old, at least 60 years old, at least 65 years old, at least 70 years old, at least 75 years old, or at least 80 years old or older. In some embodiments, the subject is a pediatric subject (i.e., less than 18 years old).

### V. Nucleic Acids Encoding Nanoparticles and Coronavirus Proteins

[0169] Additionally disclosed herein are nucleic acid-based vaccines, priming agents (i.e., vaccine primers), and boosters that can be used to treat or prevent coronavirus infections such as COVID-19, which is caused by SARS-CoV-2, or to treat or prevent SARS-CoV-1 infection. For example, the disclosed nucleic acids can comprise DNA or mRNA that encodes a receptor binding domain (RBD) or other antigenic peptide of a coronavirus (e.g., SARS-CoV-2 or SARS-CoV-1) or any fusion protein described herein (i.e., a fusion protein comprising a nanoparticle-forming peptide and an antigenic coronavirus peptide, which may optionally be connected by a linker). The antigenic coronavirus peptide encoded by the nucleic acid may comprise one or more fragments or full-length proteins derived from a coronavirus (e.g., SARS-CoV-2 or SARS-CoV-1), such as the S protein and, in particular, the RBD of the S protein.

### A. DNA Vaccines, Primers, and Boosters

[0170] DNA encoding a fusion protein disclosed herein or a coronavirus S protein or fragment or variant thereof may be used as a vaccine, as a primer that can be administered prior to the administration of a nanoparticle vaccine disclosed herein, or as a booster after the administration of a nanoparticle vaccine disclosed herein. For example, the DNA can encode all, a fragment, or a variant of the RBD (or other antigenic peptide) of a coronavirus S protein (e.g., the S protein of SARS-CoV-2 or SARS-CoV-1). The DNA may be incorporated into a plasmid, which may comprise the necessary components (e.g., promoter) to express the DNA in vivo after administration to a subject, and the plasmid can be operably organized for expression in a mammal, such as a human.

[0171] For example, a sequence-optimized DNA encoding SARS-CoV-2 SpFN_1B-06-PL protein or other sequence described herein, can be synthesized in vitro using any method know in the art. Example 8 details the production of an exemplary DNA, which comprises SEQ ID NO: 282 and encodes a protein comprising SEQ ID NO: 283. Both SEQ ID NO: 282 and 283 are shown below. Parallel methodology can be used to practice other embodiments of DNA vaccines, primers, and boosters contemplated herein.

atggactctaagggcagctcccagaagggcagcaggctgctgctgctgct
ggtggtgagcaacctgctgctgcctcagggcgtggtgggcaacatcacca
atctgtgcccattcggcgaggtgtttaatgccacacgcttcgcctccgtg
tatgcctggaaccggaagagaatcagcaattgcgtggccgactattccgt
gctgtacaactctgccagcttctccacctttaagtgctatggcgtgagcc
ctaccaagctgaacgacctgtgcttcacaaacgtgtacgccgactccttt
gtgatccggggcgatgaggtgagacagatcgcaccaggacagaccggcaa
gatcgcagactacaactataagctgcctgacgacttcaccggctgcgtga
tcgcctggaattccaacaatctggattctaaagtgggcggcaactacaat
tatctgtacaggctgttccgcaagagcaacctgaagccatttgagcggga
tatctccaccgagatctaccaggccggctctacaccctgcaacggcgtgg
agggcttcaattgttattttcctctgcagtcctacggcttccagccaacc
aatggcgtgggctatcagccctaccgggtggtggtgctgtcttttgagct
gctgcacgcaccagcaaccgtgtgcggacctctggaggtgctgttccagg
gaccatctgcctggagccacccacagtttgagaagggaggaggctctgga
ggaggctccggaggctctgcctggagccacccccagttcgagaagggcag
ccatcatcatcaccaccaccaccactgatga (SEQ ID NO: 282).

NITNLCPFGEVFNATRFASVYAWNRKRISNCVADYSVLYNSASFSTFKCY
GVSPTKLNDLCFTNVYADSFVIRGDEVRQIAPGQTGKIADYNYKLPDDFT
GCVIAWNSNNLDSKVGGNYNYLYRLFRKSNLKPFERDISTEIYQAGSTPC
NGVEGFNCYFPLQSYGFQPTNGVGYQPYRVVVLSFELLHAPATVCGPLEV
LFQGPSAWSHPQFEKGGGSGGGSGGSAWSHPQFEKGSHHHHHHHH (SEQ
ID NO: 283).

### B. mRNA Vaccines

[0172] A mRNA vaccine can be prepared by preparing an mRNA molecule that encodes any one of the fusion proteins disclosed herein. As a result of the self-assembling nature of the disclosed nanoparticle, expression of such an mRNA after administration to a subject will result in the formation of nanoparticles in vivo, and such a nanoparticle can elicit an immunogenic response from the subject, such as the subject will produce coronavirus-specific antibodies. Accordingly the present disclosure provides mRNA, which can be used as vaccines, that encode any fusion protein disclosed herein.

[0173] For example, an mRNA vaccine can comprise a mRNA sequence encoding a fusion protein comprising a nanoparticle-forming peptide and an antigenic coronavirus peptide as disclosed herein (e.g., a fusion protein as disclosed herein). For example,the antigenic coronavirus peptide can comprise one or more of the following antigenic coronavirus peptides:
[0174] a. a receptor-binding domain (RBD) of a coronavirus, or a fragment or variant thereof,
[0175] b. an N-terminal domain (NTD) of a coronavirus, or a fragment or variant thereof,
[0176] c. an S1 domain of a coronavirus, or a fragment or variant thereof,
[0177] d. a stabilized extracellular spike S-2P domain of a coronavirus, or a fragment or variant thereof,
[0178] e. a stabilized extracellular spike S domain of a coronavirus, or a fragment or variant thereof, and
[0179] f. a stabilized extracellular spike S-trimer of a coronavirus, or a fragment or variant thereof;.
The nanoparticle-forming peptide can be any nanoparticle-forming peptide described herein, and may be or comprise a ferritin protein or a fragment or variant thereof, which optionally can be or comprise Helicobacter pylori ferritin (Hpf) or a fragment or variant thereof.

[0180] The mRNA vaccine can optionally comprise a linker, as disclosed herein, that connects the antigenic coronavirus peptide to the nanoparticle-forming peptide. An mRNA vaccine can encode any protein listed in Table 18.

[0181] A sequence-optimized mRNA encoding SARS-CoV-2 SpFN_1B-06-PLprotein or other sequence described herein, can be synthesized in vitro using an optimized T7 RNA polymerase-mediated transcription reaction with complete replacement of uridine by N1-methyl-pseudouridine. The reaction can include a DNA template containing the immunogen open reading frame flanked by 5′ untranslated region (UTR) and 3′ UTR sequences and can be terminated by an encoded polyA tail. After transcription, the Cap 1 structure can be added to the 5′ end using vaccinia capping enzyme (New England Biolabs) and Vaccinia 2′ O-methyltransferase (New England Biolabs). The mRNA can be purified by oligo-dT affinity purification, buffer exchanged by tangential flow filtration into sodium acetate, pH 5.0, sterile filtered, and kept frozen at -20° C. until use.

[0182] The mRNA can be encapsulated in a lipid nanoparticle (LNP) through a modified ethanol-drop nanoprecipitation process. In brief, ionizable, structural, helper and polyethylene glycol lipids can be mixed with mRNA in acetate buffer, pH 5.0, at a given ratio of lipids:mRNA. The mixture can be neutralized with Tris-Cl pH 7.5, sucrose added as a cryoprotectant, sterile filtered and stored frozen at -70° C. until further use. The mRNA and LNP can be as follows: The lipid nanoparticle contains RNA, an ionizable lipid, ((4-hydroxybutyl)azanediyl)bis(hexane-6,1-diyl)bis(2-hexyldecanoate)), a PEGylated lipid, 2-[(polyethylene glycol)-2000J-N,N-ditetradecylacetamide and two structural lipids (1,2-distearoyl-sn-glycero-3-phosphocholine (DSPC])and cholesterol). Those skilled in the art will understand that this is merely one exemplary way of formulating mRNA and that other methods and formulating agents (e.g., other lipids) used in the art may be suitable as well. Parallel methodology can be used to practice other embodiments of mRNA vaccines contemplated herein.

[0183] The present disclosure provides methods of treating or preventing coronavirus infections, such as COVID-19 or SARS-CoV-1 infections (for example), with the disclosed mRNA vaccines, as well as uses of the disclosed mRNA vaccines for treating or preventing coronavirus infections, such as COVID-19 or other coronavirus infections.

### C. Nucleic Acid Formulations and Adjuvants

[0184] The nucleic acid vaccines, primers, and boosters disclosed herein may be formulated for systemic administration via parenteral delivery. Parenteral administration includes intravenous, intra-arterial, subcutaneous, intradermal, intraperitoneal, or intramuscular injection or infusion. Formulations for parenteral administration may include sterile aqueous solutions, which may also contain buffers, diluents and other pharmaceutically acceptable additives known to the skilled artisan. For intravenous use, the total concentration of solutes may be controlled to render the preparation isotonic. Intravenous, intra-arterial, subcutaneous, or intramuscular injection are preferred routes of administration. Additionally or alternatively, the disclosed vaccines can be formulated for intranasal administration or contact with other mucosa membranes.

[0185] Formulations of the nucleic acids for injection may be presented in unit dosage form, e.g., in ampules, or in multi-dose containers, optionally with an added preservative. The formulations may take such forms as suspensions, solutions or emulsions in oily or aqueous vehicles, and may contain formulatory agents such as suspending, stabilizing and/or dispersing agents. The formulations may comprise any suitable pharmaceutically acceptable excipients.

[0186] Commonly, nucleic acids that are administered to a subject are formulated in a lipid composition, such as a lipid nanoparticle. Such LNPs and other lipid-based carriers are known in the art.

[0187] Formulations comprising a disclosed nucleic acid vaccine, primer, or booster may also comprise a suitable adjuvant, such as one or more of ALFQ and Alhydrogel and other adjuvants, such as monophosphoryl lipid A (MPLA), oil in water emulsions, ADJUPLEX™, X, CARBOPOL® polymers, Poly IC:LC, PolyI:C, CpG, Flagellin, Iscomatrix, Virosome, MF59, AS03, and AS04, among others.

### VI. Screening for Binding Molecules

[0188] In addition to being used for treatment, the disclosed nanoparticles and fusion proteins can be used to screen binding molecules, such as antibodies, for ability to bind to and neutralize a coronavirus (e.g., SARS-CoV-1 or SARS-CoV-2). Any of the fusion proteins disclosed in Table 18 or nanoparticles comprising the fusion proteins in Table 18 can be contacted with a putative coronavirus binding molecule, such as a putative anti-coronavirus antibody, and assessed for binding to the fusion protein or nanoparticle. Antibodies (or other binding molecules) that bind to the fusion proteins disclosed in Table 18 or nanoparticles comprising the fusion proteins in Table 18 are expected to be neutralizing.

### VII. Passive Immunotherapy and Treatment With Binding Molecules

[0189] Binding molecules (e.g., antibodies that bind to SARS-CoV-2 or another coronavirus as disclosed herein) can be used for passive immunotherapy to prevent the development of a coronavirus infection or for the treatment of a subject that already has a coronavirus infection. In general, coronavirus-specific antibodies can be obtained from a subject that was administered a vaccine disclosed herein or coronavirus-specific antibodies can be identified from a subject that recovered from a coronavirus infection (e.g., COVID-19) using the disclosed fusion proteins and nanoparticles as bait for a screening assay. These antibodies can be administered to a subject that has been exposed to or is at risk of exposure to a coronavirus in order to prevent the development of a coronavirus infection such as COVID-19 or SARS-CoV-1 infection, for example (i.e., the antibodies can serve as a “passive immunotherapy”). Additionally or alternatively, these antibodies can be administered to a subject that has been infected with a coronavirus, such as SARS-CoV-1 or SARS-CoV-2, to treat the infection by, for example, reducing or eliminating viral load.

[0190] The disclosed binding proteins may be or be derived from a human IgG1 antibody, a human IgG2 antibody, a human IgG3 antibody, or a human IgG4 antibody. In some embodiments, the binding protein may be or be derived from a class of antibody selected from IgG, IgM, IgA, IgE, and IgD. That is, the disclosed binding proteins may comprise all or part of the constant regions, framework regions, or a combination thereof of an IgG, IgM, IgA, IgE, or IgD antibody. For instance, a disclosed binding protein comprising an IgG1 immunoglobulin structure may be modified to replace (or “switch”) the IgG1 structure with the corresponding structure of another IgG-class immunoglobulin or an IgM, IgA, IgE, or IgD immunoglobulin. This type of modification or switching may be performed in order to augment the neutralization functions of the peptide, such as antibody dependent cell cytotoxicity (ADCC) and complement fixation (CDC). A person of ordinary skill in the art will understand that, for example, a recombinant IgG1 immunoglobulin structure can be “switched” to the corresponding regions of immunoglobulin structures from other immunoglobulin classes, such as recombinant secretory IgA1 or recombinant secretory IgA2, such as may be useful for topical application onto mucosal surfaces. For example, immunoglobulin IgA structures are known to have applications in protective immune surveillance directed against invasion of infectious diseases, which makes such structures suitable for methods of using the disclosed binding proteins in such contexts, e.g., treating or preventing coronavirus infection (e.g., COVID-19 or SARS-CoV-1 infection) or the spread of coronavirus from one individual to another.

[0191] Any of the coronavirus-specific binding proteins or antibodies obtained from a subject inoculated with a disclosed vaccine or screened/selected using the disclosed fusion proteins can be used for treating and/or preventing a coronavirus infection, such as COVID-19 or SARS-CoV-1 infection, for example. Optimal doses and routes of administration may vary, such as based on the route of administration and dosage form, the age and weight of the subject, and/or the subject’s condition, including the type and severity of the coronavirus infection, and can be determined by the skilled practitioner. The binding proteins can be formulated in a pharmaceutical composition suitable for administration to a subject by any intended route of administration.

[0192] The following examples are given to illustrate the present disclosure. It should be understood that the invention is not to be limited to the specific conditions or details described in these examples.

### EXAMPLES

### Example 1 - Design and Testing of Fusion Proteins and Nanoparticles

[0193] Recently, the molecular structure of recombinant full-length SARS-CoV-2 Spike protein was solved in a stabilized pre-fusion state, by single particle cryo-Electron Microscopy (cryo-EM), at a resolution of 3.8 Å (Wrapp et al., 2020). Despite the comprehensive structural characterization of the spike protein as a whole, movement of the RBD between “up” and “down” conformational states prevented complete modeling of the RBD domains. Subsequent cryo-EM investigations of SARS-CoV-2 provided more detail of RBD, particularly at sites that contact the human ACE-2 receptor (Yan et al., 2020a). Here, the first high resolution—less than 2 Å—SARS-CoV-2 RBD is reported. Additionally, the antigenicity of this recombinant RBD is reported and it is particularly of interest given the equipoise in the literature regarding the binding affinities of SARS-CoV antibodies for SARS-CoV-2 RBD. Early reports, have described that the human SARS-CoV antibody, CR3022, is able to bind to the SARS-CoV-2 RBD. In the present example, binding was verified, and subsequently solved the structure of SARS-CoV-2 RBD in complex with CR3022 with a novel “cryptic” epitope.

### Protocols

### Production of Recombinant Proteins

[0194] The Shanghai Public Health Clinical Center & School of Public Health, in collaboration with the Central Hospital of Wuhan, Huazhong University of Science and Technology, the Wuhan Center for Disease Control and Prevention, the National Institute for Communicable Disease Control and Prevention, Chinese Center for Disease Control, and the University of Sydney, Sydney, Australia released the sequence of a coronavirus genome from a case of a respiratory disease from Wuhan on January 10^{th} 2020 available at recombinomics.co/topic/4351-wuhan-coronavirus-2019-ncov-sequences/. The sequence was also deposited in GenBank (accession MN908947) and GISAID (>EPI_ISL_402125). DNA encoding the SARS-Cov-2 RBD (residues 331-527) was synthesized (Genscript) with a C-terminal His6 purification tag and cloned into a CMVR plasmid, and protein was expressed by transient transfection in 293F cells for six days. The SARS-CoV-2 RBD-His protein was purified from cell culture supernatant using a Ni-NTA (Qiagen) affinity column. DNA encoding the S protein ectodomains (residues 1-1194) from bat SARS-related CoV isolates Rs4231 and Rs4874 (ref.(Hu et al., 2017)) were synthesized (Genscript) with a C-terminal T4-Foldon domain or C-terminal GCN domain, respectively, followed by factor xA cleavage sites and Strep-Tactin purification tags. Bat SARSr-CoV S genes were cloned into a modified pcDNA3.1 expression plasmid (Chan et al., 2009). Protein was initially expressed by transient transfection in 293F cells for six days, then serial cloned to select stably expressing cell lines (Yan L., in submission). The Rs4231-T4 and Rs4874-GCN S proteins were purified from cell culture supernatant using a Strep-Tactin affinity column. The oligomeric structure of these S proteins was selected by size exclusion chromatography (GE/AKTA) and trimeric S proteins were confirmed by Native-PAGE. SARS S-2P was produced as previously described, with Strep-Tactin affinity chromatography followed by gel filtration using a 16/60 Superdex-200 purification column. Purification purity for all S glycoproteins was assessed by SDS-PAGE.

[0195] The sequences of the CR3022 variable regions of the heavy and light chains are available in GenBank under accession numbers DQ168569 and DQ168570, respectively (ter Meulen et al., 2006). These sequences were synthesized (Genscript) and cloned into CMVR expression vectors (NIH AIDS reagent program) between a murine Ig leader (GenBank DQ407610) and the constant regions of human IgG1 (GenBank AAA02914), Igκ (GenBank AKL91145). Plasmids encoding heavy and light chains were co-transfected into Expi293F cells (ThermoFisher) according to the manufacturer’s instructions. After 5 days, antibodies were purified from cleared culture supernatants with Protein A agarose (ThermoFisher) using standard procedures, buffer exchanged into Phosphate-Buffered Saline (PBS), and quantified using calculated E and A280 measurements.

[0196] The Fab fragment of antibody CR3022 was prepared by digestion of the full-length IgG using enzyme Lys-C (Roche). The digestion reaction was allowed to proceed for 2.5 hours at 37° C. Digestion was assessed by SDS-PAGE and upon completion, the reaction mixture was passed through protein-G beads (0.5-1 ml beads), 3 times and the final flow through was assessed by SDS-PAGE for purity. The Fab fragment was mixed with purified SARS-CoV-2 RBD, and the complex was allowed to form for 1 hour at room temperature.

[0197] Cell lines: Expi293F (ThermoFisher Scientific #A14527), and 293F cell lines were utilized in this study.

### X-Ray Crystallography

[0198] Crystallization - SARS-CoV-2 RBD at 10 mg/ml and 5 mg/ml in PBS buffer was screened for crystallization conditions using an Art Robbins Gryphon crystallization robot, 0.2 µl drops, and a set of 1200 crystallization conditions. Crystal drops were observed using a Jan Scientific UVEX-PS with automated UV and brightfield drop imaging robot. Crystals of the SARS-CoV-2 RBD grew after 24 hours in multiple conditions from the Molecular Dimensions MIDAS crystal screen, with diffraction-quality crystals seen in conditions B1, G1, F6, and H10. CR3022 Fab was screened for crystallization at 10.0 mg/ml and 5.0 mg/ml concentrations in PBS. Diffraction quality crystals grew after 48 hours in 0.1 M Imidazole pH 6.5, 40% 2-propanol and 15% PEG 8,000. For the complex, CR3022 Fab and SARS-CoV-2 RBD were mixed in 1:1 molar ratio and crystallization drops were set-up at 8.0 and 4.0 mg/ml concentrations in PBS buffer as described above. Crystals grew in a crystallization condition containing 1 M Succinic acid, 0.1 M HEPES pH 7.0 and 2% PEG MME2000. Both, RBD alone and CR3022 Fab-RBD complex, crystals were harvested and cryo-cooled in their respective crystallization conditions plus 25% glycerol.

[0199] Diffraction data collection and processing - Single crystals were transferred to mother liquor containing 22% glycerol, and cryo-cooled in liquid nitrogen prior to data collection. Diffraction data for SARS-CoV-2 RBD were collected at Advanced Photon Source (APS), Argonne National Laboratory, NE-CAT ID24-C beamline, and measured using a Dectris Eiger 16 M PIXEL detector. Crystals grown in MIDAS condition B1 (20% Jeffamine D2000, 10% Jeffamine M2005, 0.2 M NaCl, 0.1 M MES pH 5.5) provided the highest resolution diffraction with spots visible to 1.8 Å. A complete dataset could be processed to 1.95 Å in space group P41212. CR3022 Fab crystals diffracted to 3.3 Å on NE-CAT ID24-C beamline. Diffraction data could be scaled in P21 space group with 99.9% completeness. Diffraction data for CR3022 and SARS-CoV-2 RBD complex were collected on NE-CAT ID24-C beamline at Advanced Photon Source (APS), and measured using a Dectris Eiger 16 M PIXEL detector. Diffraction data from multiple crystals were merged and scaled together to achieve a final resolution of 4.2 Å with overall completeness of 82.2%. Data collection statistics are reported in Table 19 at the end of the specification.

[0200] Structure solution and refinement - Phenix xtriage was used to analyze the scaled diffraction data produced from HKL2000 and XDS. Data was analyzed for completeness, Matthew’s coefficient, twinning or pseudo-translational pathology. The structure of the SARS-CoV-2 RBD was determined by molecular replacement using Phaser and a search model of the SARS RBD (PDB ID: 2AJF, molecule C). CR3022 Fab crystal structure was determined by molecular replacement using Coxsackievirus A6 neutralizing antibody 1D5 (PDB ID: 5XS7) as a search model. The CR3022-RBD complex structure was determined by molecular replacement using the refined CR3022 and SARS-CoV-2 RBD structures as search models. Refinement was carried out using Phenix refine with positional, global isotropic B factor refinement, and defined TLS groups, with iterative cycles of manual model building using COOT. Structure quality was assessed with MolProbity. The final refinement statistics for all the structures are reported in Table 18. All structure figures were generated using PyMOL (The PyMOL Molecular Graphics System [DeLano Scientific]).

### Structure Comparisons

[0201] Weighing epitope sites based on antigen-antibody interactions - Epitope sites correspond to antigen sites that are in contact with the antibody in the antigen-antibody complex (i.e. all sites that have non-hydrogen atoms within 4 Å of the antibody). For a given epitope site, the weight, which characterizes the interaction between the epitope site and the antibody (improved based on (Bai et al., 2019)), was defined as:

$$w = \frac{1}{2} \left(\frac{{n}_{c}}{\left〈{n}_{c}\right〉} + \frac{{n}_{n b}}{\left〈{n}_{n b}\right〉}\right)$$

in which, n_{c} is the number of contacts with the antibody (i.e. the number of non-hydrogen antibody atoms within 4 Å of the site) ; n_{nb} is the number of neighboring antibody residues; 〈n_{c}〉 is the mean number of contacts n, and 〈n_{nb}〉 is the mean number of neighboring antibody residues n_{nb} across all epitope sites. A weight of 1.0 is attributed to the average interaction across all epitope sites. Neighboring residue pairs were identified by Delaunay tetrahedralization of side-chain centers of residues (C_{α} is counted as a side chain atom, pairs further than 8.5 Å were excluded). Quickhull(Barber, 1996) was used for the tetrahedralization and Biopython PDB (Hamelryck and Manderick, 2003) to handle the protein structure.

[0202] In the SARS-CoV-2 and SARS-CoV-1 RBD comparison, residues were considered similar for the following residues pairs: RK, RQ, KQ, QE, QN, ED, DN, TS, SA, VI, IL, LM and FY.

[0203] Biolayer interferometry - Affinity kinetic interactions between SARS-CoV-2 RBD proteins and antibodies were monitored on an Octet RED96 instrument (ForteBio). After reference subtraction, binding kinetic constants were determined, from at least 4 concentrations of Fab, by fitting the curves to a 1:1 Langmuir binding model using the Data analysis software 9.0 (FortéBio). Antibodies were loaded at 30 µg/ml onto a AHC probe for 120 s followed by baseline incubation for 30-60 s.

[0204] To assess antibody competition, either 240CD or CR3022 or a non-specific control antibody CR1-07 was incubated with the SARS-CoV-2 RBD prior to assessment of binding to CR3022 or 240CD. Antibody concentration was 30 µg/ml. To assess binding of human ACE-2 receptor in the presence or absence of antibodies CR3022, or 240CD, RBD was loaded onto a HIS probe. The RBD was then sequentially incubated with either CR3022, 240CD or control antibody CR1-07 prior to incubation with human ACE-2 receptor.

[0205] CR3022 was loaded onto an AHC probe for 120s prior to incubation with SARS-CoV S glycoproteins (15 µg/ml) alone or pre-incubated with ACE2 protein. SARS S-2P protein was treated with 0.1% bovine pancreas trypsin for 10 minutes prior to binding to binding measurements. SARS Spike protein was provided by BEI resources, Lot 768P152. Binding of CR3022 was also carried out against a series of concentrations of SARS S-2P which had been treated with 0.1% w/w bovine pancreatic trypsin.

TABLE 4

Crystallographic Data Collection and Refinement Statistics

| | SARS-CoV-2 RBD | CR3022 Fab | SARS-CoV-2 RBD + CR3022 Fab |
|---|---|---|---|
| PDB Code | | 6W7Y | |
| Data collection | | | |
| Space group | P4₁2₁2 | P2₁ | P4₁22 |
| Cell dimensions | | | |
| a, b, c (Å) | 80.5.80.5,161.7 | 52.1, 201.0, 57.0 | 1151.17, 151.17,192.9 |
| α, β, γ (°) | 90.0,90.0,90.0 | 90.0, 109.4.0, 90.0 | 90.0,90.0,90.0 |
| Resolution(Å) | 50.0-1.95 (2.02-1.95) | 50.00-3.3 (3.42-3.30) | 50.0-4.2 (4.35-4.20) |
| Reflection (uni/tot) | 38,164/107,541 | 16,019/30,025 | 13,814/84,711 |
| R_{sym} or R_{merge} | 4.7 (79.3) | 8.9 (28.0) | 24.6 (108.8) |
| Rₚᵢₘ | 3.1 (59.8) | 6.3 (19.8) | 9.4 (57.0) |
| CC½ | 98.9 (70.6) | 199.1 (93.5) | 198.2 (47.6) |
| I/σI | 18.9 (1.1) | 10.2 (1.6) | 5.57 (1.0) |
| Completeness (%) | 96.8 (90.0) | 96.5 (95.4) | 82.2 (48.8) |
| Redundancy | 2.8 (2.4) | 1.9 (1.9) | 6.1(3.4) |
| Refinement | | | |
| Resolution (Å) | 20.0-1.95 | 20.0-3.3 | 30.0-4.2 |
| Reflections | 29,582 | 15,999 | 11,120 |
| R_{work} / R_{free}* | 16.5/20.0 | 25.4/27.5 | 24.2/29.2 |
| Protein | 1,596 | 6,579 | 4,928 |
| Ligand/ion | 97 | – | 28 |
| Water | 79 | – | n/a |
| Protein | 28.8 | 66.7 | 145.6 |
| Ligand/ion | 56.2 | – | 190.4 |
| Water | 45.3 | – | n/a |
| Ramachandran | | | |
| Favored/Allowed/Outliers | 94.5/5.5/0.0 | 90.8/8.0/1.2 | 92.0/8.0/0.0 |
| Bond lengths (Å) | 0.007 | 0.015 | 0.003 |
| Bond angles (°) | 0.874 | 1.52 | 0.621 |

Values in parentheses are for highest-resolution shells.
* Rfree was calculated using ~5% randomly selected reflections.

### Additional Methods

[0206] Mouse Immunizations: C57BL/6 or balb/c mice were immunized typically with 10 µg of immunogen mixed with adjuvant, either ALFQ or Alhydrogel (preparation described below) in a final volume of 50 µl. In other instances, 0.08 µg of immunogen was mixed with adjuvant, either ALFQ or Alhydrogel (preparation described below) in a final volume of 50 µl. In other instances, the dose of immunogen was either 2 µg or 0.4 µg or 0.016 µg or 0.0032 µg, which was mixed with adjuvant, either ALFQ or Alhydrogel (preparation described below) in a final volume of 50 µl.

[0207] A single injection site was used at a given immunization time point. Mice were immunized at week 0, 3, and 6. Mice were bled prior to the immunization study start (pre-bleed) and at week 2, 5, 8, 10, 12. Mice were 6-10 weeks of age at time of first immunization.

[0208] Adjuvants: ALFQ (1.5X) (Lot# 05042020-ALFQ) liposomes contain 600 µg/mL 3D-PHAD and 300 µg/mL QS-21. 14.7 mL of ALF55 (Lot#02282020-ALF55, containing 1.236 mg/mL 3D-PHAD) was diluted with 6.5 mL of isotonic Sorensen’s PBS pH 6.15 in a sterile glass vial. ALFQ was created by adding 9.08 mL of QS-21 (1 mg/mL) to the diluted ALF55 while slowly stirring. The vial was sealed and incubated on a roller for 1 hour at room temperature. ALFQ was stored at 4° C. until use. ALFQ was gently mixed by slow speed vortex prior to use.

[0209] Vaccine Formulation: Aliquot 250 µL of ALFQ (1.5X, 600 µg/mL 3D-PHAD) to a sterile glass vial. Add 125 µL of Antigen (600 µg/mL) to the ALFQ and mix with pipetting 10 times. Seal the vial. Vortex the vial with slow speed for 1 min and put it on a roller for 15 mins. Store the vial at 4° C. prior to immunization. Prepare 1 hour before immunization. Inject 50 µL/mouse IM.

[0210] Alhydrogel: Alhydrogel Stock contains 10 mg/ml aluminum (GMP grade; Brenntag).

[0211] Antigen: All reagents were equilibrated to room temperature before use. Antigens were diluted to be 600 µg/mL by adding filter sterilized dPBS (Lot#723188, Quality Biological) to the tubes. Tubes were mixed by pipetting ten times.

[0212] Vaccine Formulation: Dilute Alhydrogel to 900 µg/mL (1.5X) by mixing 43.2 µL of Alhydrogel stock (10 mg/mL) with 436.8 µL of DPBS in a sterile glass vial. Add 240 µL of Antigen (600 µg/mL) to the vial containing the diluted Alhydrogel and seal the vial. Vortex with slow speed for 5 min and store at 4° C. for at least 2 hours prior to immunization. Inject 50 µL/mouse.

[0213] Octet Binding studies: SARS-CoV-2 RBD and mouse sera binding were monitored using an Octet RED96 instrument (FortéBio). Mouse sera was typically diluted 1:100 in BioForte Kinetics Buffer (some samples from the week 5 time point were also assessed at 1:200 or 1:400 dilution). A His1K probe was pre-equilibrated in Kinetics buffer. SARS-CoV-2 RBD-His protein was diluted to 30 µg/ml in PBS and allowed to interact with the His1K probe for 120 s, with typical response levels of 1 nm observed. The probe was briefly equilibrated in Kinetics buffer, and then allowed to interact with the diluted mouse sera for 120-180s. Binding response levels after 180 s were noted and are shown in FIGS. 13, 18, 24 and 25.

[0214] Octet ACE-2 receptor inhibition studies: As described above, Mouse sera at a 1:50 dilution in Kinetics buffer was prepared. Two-fold serial dilutions were prepared. SARS-CoV-2 was bound to a HIS1K probe and incubated with mouse sera for 180 s, and then assessed for binding to human ACE-2 receptor as shown in FIG. 15. Mouse sera from pre-bleed samples were also incubated with RBD and showed no binding to the RBD, or no resulting inhibition of ACE-2 binding.

[0215] Characterization of Immunogens by Octet Biolayer Interferometry: A set of monoclonal antibodies were used to assess reactivity to immunogens. These include RBD-targeting antibodies that are non-neutralizing or poorly-neutralizing and include CR3022, CV1, and S625-109, and neutralizing antibodies H14, 441, CVH1, and CVH5, or NTD-targeting antibodies S625-118 and P22_7. Antigens and antibodies were monitored using an Octet RED96 instrument (ForteBio). Antibodies (40 µg/ml) were loaded onto AHC probes, equilibrated in Kinetics buffer, prior to interaction with antigens of interest for 100 s. Antibodies were allowed to be dissociated for 40 s.

[0216] Characterization of SARS-CoV-2-Ferritin immunogens by size-exclusion chromatography: Immunogens were initially purified from cell supernatant by affinity chromatography using either NiNTA or GNA-lectin resin. Samples were then loaded onto a Superdex-200 column (20 ml or 120 ml column volume). Nanoparticle formation and uniformity were judged from the resulting chromatogram. S-Ferritin nanoparticles would be expected to elute at 10 ml (20 ml column) or 40 ml (120 ml column). In some immunogens, multiple peaks were observed. The eluted protein corresponding to the expected molecular weight of the S-nanoparticle as shown in FIGS. 6-10 was used for further characterization including the mouse immunization studies.

TABLE 5

Summary of mouse immunization studies (102 groups of mice)
Control group constructs

| pCOV no. | Immunogen design category, Study design | C57BL/6 ALFQ | Balb/c ALFQ | C57BL/6 Alhydrogel | Balb/c Alhydrogel |
|---|---|---|---|---|---|
| 3 | RBD monomer (control) | X | X | X | X |
| 47 | S-2P Trimer (control) | X | X | X | X |
| 71 | NTD monomer (control) | X | X | | |
| DNA prime and Protein Boost | | | | | |
| 3 + 3 | RBD DNA prime, RBD Protein Boost – GS adjuvant | X | X | | |
| 3+1 | RBD DNA prime, RBD-Ferritin Protein Boost – GS adjuvant | X | X | | |
| Spike-Ferritin constructs | | | | | |
| 1B-05 | S-Trimer-Ferritin (x 2 groups) | XX | XX | | |
| 1B-05 | S-Trimer-Ferritin (50 ug) | X | X | | |
| 1B-06-PL | S-Trimer-Ferritin | X | X | X | X |
| 1B-06-PL | S-Trimer-Ferritin 7 doses 10 µg - 0.0032 µg | XXXX XXX | XXXX XXX | | |
| 1B-06-PL | S-Trimer-Ferritin Development Grade cGMP material 3 doses 10 µg - 0.08 µg | XXX | XXX | | |
| 186 | S-Trimer-Ferritin (1B-06-PL with HexaPro + D614G) | X | X | | |
| 187 | S-Trimer-Ferritin (1B-08-PL with D614G) | X | X | | |
| RBD-Ferritin constructs | | | | | |
| pCOV no. | Immunogen design category, Study design | C57BL/6 ALFQ | Balb/c ALFQ | C57BL/6 Alhydrogel | Balb/c Alhydrogel |
| 50 | RBD-Ferritin | | X | | |
| 58 | RBD-Ferritin | X | X | X | X |
| 59 | RBD-Ferritin | | X | | |
| 127 | RBD(57+58)-Ferritin | X | X | X | X |
| 129 | RBD(50+58)-Ferritin | X | X | X | X |
| 130 | RBD(50+59)-Ferritin | | X | | |
| 131 | RBD(53+58)-Ferritin | X | X | X | X |
| Spike-Ferritin constructs Boosted with RBD-Ferritin construct | | | | | |
| 1B-06-PL + 131 boosts | S-Trimer-Ferritin prime with RBD-Ferritin boost | X | X | | |
| 187 + 131 boosts | S-Trimer-Ferritin prime RBD-Ferritin 131 boost | X | X | | |
| NTD-Ferritin constructs | | | | | |
| 23 | NTD-Ferritin | X | X | X | X |
| 65 | NTD-Ferritin (x 2 groups) | XX | XX | | |
| S1–Ferritin constructs | | | | | |
| pCOV no. | Immunogen design category, Study design | C57BL/6 ALFQ | Balb/c ALFQ | C57BL/6 Alhydrogel | Balb/c Alhydrogel |
| 111 | S1-Ferritin | X | X | | |
| RBD-NTD-Ferritin constructs | | | | | |
| pCOV no. | Immunogen design category, Study design | C57BL/6 ALFQ | Balb/c ALFQ | C57BL/6 Alhydrogel | Balb/c Alhydrogel |
| 122 | RBD-NTD-Ferritin | X | X | | |
| 125 | RBD(58)-NTD-Ferritin | | X | | X |
| 146 | RBD(53+58)-NTD-Ferritin | X | X | X | X |
| 147 | RBD(57+58)-NTD-Ferritin | X | | | |
| Co-expression of RBD-Ferritin and NTD-Ferritin constructs | | | | | |
| pCOV no. | Immunogen design category, Study design | C57BL/6 ALFQ | Balb/c ALFQ | C57BL/6 Alhydrogel | Balb/c Alhydrogel |
| 50+65 | Co-express RBD-Ferritin and NTD-Ferritin | X | X | | |
| 56+65 | Co-express RBD-Ferritin and NTD-Ferritin | X | X | | |
| 58+65 | Co-express RBD-Ferritin and NTD-Ferritin | X | X | | |
| 59+65 | Co-express RBD-Ferritin and NTD-Ferritin | X | X | | |
| Mixture of SARS-Cov-2 Spike-Ferritin and SARS-CoV-1 Spike-Ferritin constructs | | | | | |
| pCOV no. | Immunogen design category, Study design | C57BL/6 ALFQ | Balb/c ALFQ | C57BL/6 Alhydrogel | Balb/c Alhydrogel |
| 1B-06-PL + pCoVS01 | SARS-1 SpFN_1B-06-PL and SpFN_1B-06-PL 2 doses: 10 µg and 2 µg | XX | XX | | |
| | Total number of groups | 40 | 43 | 9 | 10 |

### Results

[0217] High resolution structure of the SARS-CoV-2 RBD: The SARS-CoV-2 RBD (residues 313-532), with a C-terminal His-tag, was expressed in 293F cells, and purified by NiNTA affinity, and size-exclusion chromatography. Crystallization condition screening identified 20% Jeffamine D2000, 10% Jeffamine M2005, 0.2 M NaCl, 0.1 M MES pH 5.5 for diffraction quality crystal growth. Crystals diffracted to <1.8 Å in group P 41 21 2 and to a complete dataset to 1.95 Å that could be scaled and processed (Table 4). The structure was refined to an Rfree of 20% and Rwork of 22% with no Ramachandran outliers. S residues 313-532 were clearly interpretable from the electron density map, with a dual conformation of a loop containing residues 484 to 487 clearly visible in the electron density map. Structure comparison of the unliganded RBD structure presented here, with the stabilized prefusion SARS-CoV-2 Spike (S-2P) molecule structure determined by Cryo-EM (PDB ID: 6VSB) (Wrapp et al., 2020) shows high structural similarity, with an RMSD of 0.68, 0.68, and 0.71 for each of the spike protomers. In the structure of the S-2P molecule (S-2P) (Wrapp et al., 2020) 25, 29 or 49 amino acids (aa) within each protomer RBD are not modeled, including 40% of the ACE-2 receptor binding site as measured by buried surface area (BSA)(Yan et al., 2020b). The SARS-CoV RBD-2 compared to liganded (PDB ID: 2AJF) and unliganded (PDB ID: 2GHV) SARS-CoV RBD structures shows high structural similarity, except for residues 473-488. A chimeric SARS-CoV-2 RBD structure (PDB ID: 6VW1) with 23 amino acid differences compared to SARS-CoV-2, in complex with human ACE-2 was recently released in the PDB.

[0218] Identification of a set of cross-reactive SARS-CoV-2 antibodies: In an effort to identify antibodies that could bind to SARS-CoV-2, a set of SARS-CoV,(Tripp et al., 2005) and MERS CoV(Wang et al., 2018; Wang et al., 2015) RBD-reactive antibodies were screened for binding to the SARS-CoV-2 RBD. It was demonstrated that the SARS-CoV mouse antibody 240CD (Tripp et al., 2005) had nanomolar (nM) affinity for the SARS-CoV-2 RBD and did not significantly block ACE-2 receptor binding. CR3022—a SARS-CoV neutralizing antibody (Tian et al., 2020) identified from a human phage-display library (ter Meulen et al., 2006)—also bound to SARS-CoV-2 RBD with nM affinity. Competition binding was assessed between 240CD and CR3022, and showed that these antibodies cross-compete with each other for binding to the SARS-CoV-2 RBD.

[0219] SARS-CoV-2 has a likely zoonotic origin and horseshoe bats have been implicated as natural reservoirs of both SARS-CoV and SARS-CoV-2 (Menachery et al., 2015; Zhou et al., 2020). As such, antibody cross-reactivity was explored with the S glycoproteins of two bat SARS-related CoVs: SARSr-CoV Rs4874 (Ge et al., 2013; Yang et al., 2015) and Rs4231 (Hu et al., 2017), which are closely related to the progenitor of SARS-CoV and retain the ability to utilize human ACE-2. CR3022 was able to recognize a recombinant Spike glycoprotein generated from bat SARSr-CoV Rs4874, while 240CD, and other mouse generated monoclonal antibodies have a mixed recognition phenotype.

[0220] Crystal structure of antibody CR3022 in complex with SARS-CoV-2 RBD: The antigenic cross-reactivity of this set of antibodies (240CD and CR3022) precipitated an investigation into their molecular recognition determinants. The potential relevance of a human antibody motivated the investigation to prioritize studies of CR3022, for which a sequence was available (ter Meulen et al., 2006). The CR3022 heavy chain is encoded by IGHV5-51*03, contains a 12-aa CDR H3 with 8 V gene-encoded residues altered by somatic hypermutation. CR3022 light chain is encoded by IGKV4-1*01 with 1 V gene-encoded residue, altered by somatic hypermutation, and a 9-aa CDR L3. To provide an atomic-level understanding of the structure of the CR3022 antibody, the antigen-binding fragment (Fab) of CR3022 was crystalized. Crystals diffracted to 3.2 Å resolution in space group P 2₁. Overall the structure of the CR3022 Fab revealed a relatively flat antigen-combining site, with the exception of an extended protruding 12-aa CDR L1 loop.

[0221] To determine the structure of CR3022 in complex with the SARS-CoV-2 RBD, crystallization conditions screening was carried out with crystals of the CR3022-RBD complex forming in 1 M Succinic acid, 0.1 M Hepes pH 7, 2% PEG MME2000 and determined the crystal structure by X-ray diffraction to 4.25 Å. The complex structure was solved by molecular replacement using the refined CR3022 and SARS-CoV-2 RBD structures as search models and was refined to an R_{work}/R_{free} of 0.242/0.292. CR3022 bound to the RBD at an epitope centered on S glycoprotein residues 377-386 with a total buried surface area of 871 Å. This region is highly conserved between SARS-CoV and SARS-CoV-2. Comparison of the CR3022 epitope site with previously described antibody-complex structures for SARS-CoV, and MERS-CoV indicates that CR3022 describes a novel recognition site. Further sequence analysis of the epitope indicates that this epitope is conserved in β-coronavirus clade 2b, with also some similarity in clade 2d. To confirm that this site was also shared with 240CD, an RBD knockout mutant was produced by introducing a glycan sequon at position 384, and by biolayer interferometry show that both CR3022 and 240CD binding to the RBD can be eliminated by the introduction of a glycan at this site.

[0222] Identification of a cryptic site of vulnerability recognized by CR3022: The epitope conservation within the clade explained the antigenic cross-reactivity with both human SARS-CoV and bat SARS related CoV. To date, there has been extensive structural characterization of the SARS-CoV, and MERS-CoV spike molecule and domains, which provided a framework for understanding the novel SARS-CoV-2 spike molecule. In the context of the coronavirus trimeric S glycoproteins, the RBD displays two prototypical conformations either in an “up” or “down” position, with implications for receptor binding and cell entry. To further analyze these conformations, the CR3022 binding was modeled to the trimeric structures of SARS-CoV-2, SARS-CoV and MERS-CoV. The CR3022 epitope was occluded by adjacent spike protomers when the RBD is in the “down” conformation, but becomes more accessible when the spike is in a more open conformation here multiple RBD molecules are in the “up” conformation. These conformations are shown in FIG. 9. There was still a clash of the antibody Fc1 region with the NTD from the same protomer, or an RBD from an adjacent protomer when modeled using the static structure.

[0223] To understand whether CR3022 could bind to SARS-CoV S glycoproteins, binding to stabilized S-2P or non-stabilized versions of S was measured. Robust binding to the non-stabilized S glycoprotein was observed, while binding to SARS S-2P Trimer was low. The SARS S-2P trimer was then treated with trypsin and/or incubation with the ACE2 receptor to assess whether minimal proteolytic action or receptor binding could increase the availability of the “cryptic” CR3022 epitope. Incubation of the stabilized S-2P trimer with human ACE2 did not dramatically affect CR3022 binding, while in contrast, the trypsin treatment of the S-2P protein resulted in increased binding akin to the unstabilized S glycoprotein binding, and the level of binding was titratable, with increasing amounts of S-2P resulting in higher CR3022 binding. Given the prior neutralization and protection studies utilizing CR3022, and its ability to complement potent neutralizing antibodies, it is likely that the CR3022 epitope represents a “cryptic” epitope that becomes exposed during the processes of viral cell entry.

[0224] In summary, this data represents the most detailed structural information for the SARS-CoV-2 RBD to date and the first structure of the SARS-CoV-2 in complex with a human antibody. The presence of “cryptic” but protective epitopes for influenza (Bangaru et al., 2019), and Ebola viruses (West et al., 2018), have been previously described. The identification of a novel “cryptic” epitope for β-coronaviruses including SARS-CoV, and SARS-CoV-2 highlight a novel viral vulnerability that can be harnessed in combination with ACE2 receptor site targeting monoclonal antibodies for vaccine development.

### Example 2 - Immunogenicity of SARS-CoV-2 SpFN_1B-06-PL in Mice

[0225] Severe Acute Respiratory Syndrome associated Coronavirus 2 (SARS-CoV-2) is a zoonotic coronavirus that inflicts severe respiratory disease in humans and is the cause of the COVID-19 pandemic. Similar to the first SARS-CoV, this novel coronavirus’s surface Spike (S) glycoprotein mediates cell entry via the human angiotensin-converting enzyme 2 (ACE2) receptor, and, thus, the Spike is the principal target for the development of vaccines and immunotherapeutics. Antibodies that can bind to the Spike glycoprotein and prevent interaction with the ACE2 receptor can facilitate protection from infection. A Spike-Ferritin Protein Nanoparticle with ALFQ adjuvant (SpFN_1B-06-PL + ALFQ) vaccine has been developed to elicit protective antibody responses against SARS-CoV-2. Ferritin is a naturally occurring protein that self-assembles into a 24-member spherical particle, made up of multiple three-fold, four-fold and two-fold axes. Using the 3-fold axes, 8 trimeric SARS-CoV-2 Spike glycoproteins are presented on the surface of the self-assembling protein nanoparticle surface. The ALFQ adjuvant, a liposomal formulation containing MPLA and the QS-21 saponin, was developed by the Laboratory of Adjuvant and Antigen Research, Military HIV Research Program at WRAIR. The objective of this report was to evaluate the immunogenicity of SpFN_1B-06-PL in mice when administered intramuscularly. In this example the results from four studies were provided. Study 1 utilized a 10 µg dose of SpFN_1B-06-PL for each immunization in two mouse models (C57BL/6 and Balb/c), with ALFQ or aluminum hydroxide as an adjuvant. Study 2 utilized a reduced dose of 0.08 µg SpFN_1B-06-PL for each immunization in two mouse models with ALFQ as the adjuvant. The Spike Ferritin nanoparticle SpFN_1B-06-PL elicited antibodies that bound to SARS-CoV-2 Spike and Receptor-Binding domain, provided ACE2 blocking activity, and neutralized SARS-CoV-2 viruses in both pseudovirus and live-virus assays. The binding and neutralization responses were greater when using the ALFQ adjuvant compared to the aluminum hydroxide adjuvant. Both doses of SpFN_1B-06-PL (10 µg and 0.08 µg) gave high SARS-CoV-2 Spike and RBD binding titers and SARS-CoV-2 neutralization responses. Study 3 and Study 4 utilized a 10 µg SpFN_1B-06-PL dose with the adjuvant ALFQ for each immunization and were carried out to enable analysis of serum cytokine and CD4 and CD8 T cell responses. SpFN-1B-06-PL + ALFQ immunization elicited serum cytokine responses showed both TH1 and TH2 responses and IgG subclass usage when ALFQ was the adjuvant. In contrast, immunization with Aluminum hydroxide as the adjuvant induced a skewed antibody subclass usage in Balb/c mice. In summary, both the humoral and cellular immune response observed with the SARS-COV-2 vaccine SpFN_1B-06-PL + ALFQ elicited a robust and appropriate immune response.

### List of Abbreviations

[0226] 3D-PHAD: Monophosphoryl 3-Deacyl lipid A (synthetic)
[0227] ACE2: angiotensin-converting enzyme 2
[0228] CoV: coronavirus
[0229] CTD: C-terminal domain
[0230] dPBS: Dulbecco’s phosphate buffered saline
[0231] ELISA: Enzyme-linked immunosorbent assay
[0232] GNA: Galanthus nivalis lectin
[0233] HRP: Horseradish Peroxidase
[0234] IFN-γ: Interferon gamma
[0235] ID: Inhibitory Dilution
[0236] IgG: Immunoglobulin G
[0237] IL-2: Interleukin 2
[0238] IL-4: Interleukin 4
[0239] IM: Intramuscular(ly)
[0240] MPLA: monophosphoryl lipid A
[0241] MSD: Meso scale discovery assay
[0242] NHP: Nonhuman primate
[0243] NTD: N-terminal domain
[0244] nm: nanometer
[0245] PBS: Phosphate buffered saline
[0246] PI: Percent inhibition
[0247] QS-21: One of the active fractions isolated from soap bark tree, Quillaja saponaria, purified using reverse phase high pressure liquid chromatography (RP-HPLC). QS denotes it source as Q. saponaria and no 21 is fraction 21 on reverse phase-High-performance liquid chromatography.
[0248] RBD: Receptor-binding domain
[0249] RG: research grade
[0250] RT: room temperature
[0251] S: Spike glycoprotein
[0252] s: seconds
[0253] S-2P: Spike glycoprotein stabilized in the prefusion form by modifications (proline modifications (K986P, V987P), and removal of the Furin cleavage site (RRAS to GSAS))
[0254] SARS-CoV-2: Severe Acute Respiratory Syndrome associated coronavirus 2
[0255] SD: standard deviation
[0256] SpFN: Spike Ferritin Nanoparticle
[0257] TEM: Transmission electron microscopy
[0258] TH: T helper
[0259] TMB: 3,3’,5,5’ tetramethylbenzidine
[0260] TNF-α: Tumor Necrosis Factor alpha
[0261] VAERD: Vaccine associated enhanced respiratory disease
[0262] WRAIR: The Walter Reed Army Institute of Research

### Introduction

[0263] The zoonotic transmission of SARS-CoV-2 to humans quickly developed into a global pandemic, infecting over 115 million people to date, resulting in an urgent need for a safe, stable, effective and durable vaccine. The SARS-CoV-2 spike (S) protein is the primary target for vaccine development, as it mediates virus entry, is immunogenic and encodes multiple sites of vulnerability. S is a class I fusion glycoprotein consisting of a S1 attachment subunit and S2 fusion subunit that remain non-covalently associated in a metastable, heterotrimeric spike on the virion surface. In the S1 subunit, there is a N-terminal domain (NTD) and C-terminal domain (CTD) that includes the receptor-binding domain (RBD), which can interact specifically with human angiotensin converting enzyme 2 (ACE2). The S protein has multiple antigenic epitopes that are targeted by neutralizing antibodies, including multiple distinct sites on the RBD and the S1 domain, including the NTD. Convalescent serum antibodies capable of potently inhibiting infection in vitro can reduce disease severity or mortality in primates and humans. SARS-CoV-2 vaccines may therefore be protective if capable of eliciting high titer, durable, S-specific neutralizing antibodies.

[0264] Multiple technology platforms are currently advancing SARS-CoV-2 vaccine development, including nucleic acid vaccines, whole virus vaccines, recombinant protein subunit vaccines and nanoparticle vaccines. Of these vaccine platform types, nanoparticle technologies have previously been shown to improve antigen structure and stability, as well as vaccine targeted delivery, immunogenicity, and safety. Bacterial ferritin-based nanoparticles self-assemble into a spherical protein shell consisting of 24 identical subunits and are ideal for display of trimeric antigens recombinantly expressed at the 3-fold axis of the ferritin subunit interface. Trimer-functionalized ferritin vaccines have been effective at eliciting neutralizing antibodies against vaccine targets including influenza haemagglutinin and HIV envelope.

[0265] In order, to elicit robust immune responses, vaccines typically contain an adjuvant component that enhances the level or type of immune response. The US Army has many decades of experience investigating liposome-based adjuvants and has recently developed an Army-Liposome-Formulation (ALF) containing high amounts of cholesterol together with the QS21 saponin (ALFQ). ALFQ has been used in numerous animal studies and in combination with a variety of immunogens has shown effectiveness in eliciting robust immune responses. In contrast to some adjuvants, ALFQ tends to elicit a balanced Th1/Th2 immune response avoiding a skewed immune response that has been implicated in vaccine associated enhanced respiratory disease (VAERD). VAERD has been associated with T helper 2 cell (TH2)-biased immune responses in some animal models with a set of experimental SARS-CoV candidate vaccines and also with whole-inactivated virus vaccines against respiratory syncytial virus and measles virus.

[0266] Here assessment of SpFN_1B-06-PL ferritin-based nanoparticles is reported in the mouse model. C57BL/6 and Balb/c mice were immunized using two injection amounts of SpFN_1B-06-PL to assess dose-sparing immune responses. In addition, immunogens were adjuvanted with both ALFQ and Alhydrogel to assess immune responses. Binding, ACE2-blocking, neutralization, antibody isotype usage, T cell type and frequency and serum cytokine profiles were assessed in these studies.

### Objectives

[0267] Immunogenicity: To assess the immunogenicity of SpFN_1B-06-PL in the presence of adjuvants ALFQ and Alhydrogel in two mouse models.
[0268] Dose response: Compare immune responses elicited by a 10 ug dose to a 0.08 ug dose of SpFN_1B-06-PL.
[0269] Antibody isotype usage: To assess the SARS-CoV-2 Spike reactive antibody isotype usage following immunization with SpFN_1B-06-PL with adjuvant ALFQ or Alhydrogel in two mouse models.
[0270] T cell and cytokine responses: To assess serum cytokine levels and the frequency of IFN-gamma, IL-2, TNF-alpha and IL-4 positive T cells in mice vaccinated with SpFN_1B-06-PL adjuvanted with ALFQ or Alhydrogel.

### Materials and Methods

### Materials

[0271] All reagents were equilibrated to room temperature before use. Antigens used in mouse immunizations were diluted by adding filter-sterilized dPBS.

[0272] SpFN IB-06-PL: Research-grade SpFN_1B-06-PL was produced by transient expression in Expi293F cells (Thermo Fisher Scientific) using the same expression construct sequence as that used to create the SpFN_1B-06-PL cGMP manufacture of clinical drug product. Culture supernatant was harvested four days post-transfection and purified by Galanthus nivalis lectin (GNA)-affinity chromatography and size-exclusion chromatography. Purified research grade SpFN_1B-06-PL was formulated in PBS with 5% glycerol at 1 mg/ml.

[0273] ALFQ: ALFQ (1.5X) (Lot# 07132020-ALFQ) liposomes contain 600 µg/mL 3D-PHAD and 300 ug/mL QS-21. ALFQ was gently mixed by slow speed vortex prior to use. Antigen was added to the ALFQ, vortexed at a slow speed for 1 minute, followed by mixing on a roller for 15 minutes. The vial was stored at 4° C. for 1 hour prior to immunization.

[0274] Alhydrogel: Alhydrogel stock contains 10 mg/ml aluminum (GMP grade; Brenntag). Alhydrogel stock solution was diluted to 900 µg/mL (1.5X) and appropriate volume and concentration of antigen was added. Antigen-adjuvant mixture was vortexed at low speed for 5 min and stored at 4° C. for at least 2 hours prior to immunization. SpFN_1B-06-PL was adsorbed to aluminum hydroxide (Alhydrogel, Brenntag) at 30 µg aluminum per 50 ul dose.

### Methods

[0275] Transmission Electron Microscopy (TEM): Purified research grade SpFN_1B-06-PL protein was assessed visually by TEM deposited at 0.02-0.08 mg/ml on carbon-coated copper grids and stained with uranyl formate. Grids were imaged using a FEI T20 microscope operating at 200 kV.

[0276] Animal experiments: All research in this study involving animals was conducted in compliance with the Animal Welfare Act, and other federal statutes and regulations relating to animals and experiments involving animals and adhered to the principles stated in the Guide for the Care and Use of Laboratory Animals, NRC Publication, 1996 edition. The research protocol was approved by the Institutional Animal Care and Use Committee of the Walter Reed Army Institute of Research. Balb/c and C57BL/6 mice were obtained from Jackson Laboratories (Bar Harbor, ME). Mice were housed in the animal facility of WRAIR and cared for in accordance with local, state, federal, and institutional policies in an NIH American Association for Accreditation of Laboratory Animal Care-accredited facility.

[0277] Animal Groups and Immunization/Assay Schedule:In Study 1, C57BL/6 or Balb/c mice (n=10/group) were immunized intramuscularly with 10 µg of SpFN_1B-06-PL adjuvanted with either ALFQ or Alhydrogel in alternating caudal thigh muscles three times, at 3-week intervals; blood was collected 2 weeks before the first immunization, the day of the first immunization, and 2 weeks following each immunization, and at week 10. In study 2, mice were immunized with 0.08 µg of SpFN_1B-06-PL adjuvanted with ALFQ with immunization schedule, site of injections, and timing of bleeds as for study 1. In study 3, C57BL/6 were immunized twice with 10 µg of SpFN_1B-06-PL adjuvanted with ALFQ and blood was collected at week 2 and week 6. In study 4, C57BL/6 mice were immunized intramuscularly with 10 µg of SpFN_1B-06-PL adjuvanted with either ALFQ or Alhydrogel, and 5 mice/group were euthanized at Day 3, 5, 7 and 10. Mice were randomly assigned to experimental groups and were not pre-screened or selected based on size or other gross physical characteristics. Serum was stored at 4° C. or -80° C. until analysis. Antibody responses were analyzed by Octet Biolayer Interferometry, ELISA, pseudovirus neutralization assay, and live-virus neutralization assay. Cellular immune responses were assessed by serum cytokine analysis, antibody isotype response, and T cell cytokine responses.

TABLE 6

Experimental Design
Study 1

| Group | Animal numbers | Treatment | Volume Injected (µl) | Vaccine Target Dose (µ g) | Adjuvant | No. and mouse strain | Immunization Schedule |
|---|---|---|---|---|---|---|---|
| 1 | 921-930 | SpFN_1B-06-PL | 50 | 10 | ALFQ | 10 C57BL/6 | Weeks 0, 3, 6 |
| 2 | 9811-9815; C826-C830 | SpFN_1B-06-PL | 50 | 10 | ALFQ | 10 Balb/c | Weeks 0, 3, 6 |
| 3 | E751-E760 | SpFN_1B-06-PL | 50 | 10 | Alhydrogel | 10 C57BL/6 | Weeks 0, 3, 6 |
| 4 | E851-E860 | SpFN_1B-06-PL | 50 | 10 | Alhydrogel | 10 Balb/c | Weeks 0, 3, 6 |
| Study 2 | | | | | | | |
| Group | | Treatment | Volume Injected (µl) | Vaccine Target Dose (µ g) | Adjuvant | No. and mouse strain | Immunization Schedule |
| 1 | E791-E800 | SpFN_1B-06-PL | 50 | 0.08 | ALFQ | 10 C57BL/6 | Weeks 0, 3, 6 |
| 2 | E881-E890 | SpFN_1B-06-PL | 50 | 0.08 | ALFQ | 10 Balb/c | Weeks 0, 3, 6 |
| Study 3 | | | | | | | |
| Group | | Treatment | Volume Injected (µl) | Vaccine Target Dose (µ g) | Adjuvant | No. and mouse strain | Immunization Schedule |
| 1 | C721-C730 | SpFN_1B-06-PL | 50 | 10 | ALFQ | 9 C57BL/6 | Weeks 0, 3 |
| Study 4 | | | | | | | |
| Group | | Treatment | Volume Injected (µl) | Vaccine Target Dose (µ g) | Adjuvant | No. and mouse strain | Immunization Schedule |
| 1 | 511-530 | SpFN_1B-06-PL | 50 | 10 | Alhydrogel | 20 C57BL/6 | 0 |
| 2 | 531-550 | SpFN_1B-06-PL | 50 | 10 | ALFQ | 20 C57BL/6 | 0 |
| 3 | 501-505 | No treatment | 0 | 0 | N/A | 5 C57BL/6 | 0 |

[0278] Octet Biolayer Interferometry: Biosensors were hydrated in PBS prior to use. All assay steps were performed at 30° C. with agitation set to 1,000 rpm using an Octet RED96 instrument (ForteBio). Baseline equilibration of the anti-His-tag biosensors (HIS1K biosensors with a conjugated Penta-His antibody (ForteBio)) was carried out using assay buffer (PBS) for 15 s, prior to SARS-CoV2-RBD (30 µg/ml diluted in PBS) loading for 120 s. After briefly dipping in assay buffer (15 s in PBS), the biosensors were dipped in the mouse sera samples (100-fold dilution) for 180 s. The binding response (nm) at 180 s was recorded for each sample.

[0279] ACE2 inhibition assay: The biosensors were equilibrated in assay buffer for 30 s before being dipped in SARS-CoV-2 RBD-His (30 µg/ml diluted in PBS). The SARS-CoV-2 RBD-His were immobilized on HIS1K biosensors (FortéBio) for 180 s. After briefly dipping in assay buffer (30 s, PBS), binding of week 10 mouse serum was allowed to proceed for 180 s followed by a brief equilibration for 30 s. Binding of ACE2 protein (30 ug/ml) in solution was assessed for 120 s. Percent inhibition (PI) of RBD binding to ACE2 by mouse serum was determined by an equation: PI = 100 - [(ACE2 binding in the presence of competitor mouse serum)/(ACE2 binding in the absence of competitor mouse serum)] × 100.

[0280] Enzyme Linked Immunosorbent Assay (ELISA): 96-well Immulon “U” Bottom plates were coated with 1 µg/mL of RBD or spike protein (S-2P) antigen in PBS, pH 7.4. Plates were incubated at 4° C. overnight and blocked with blocking buffer (Dulbecco’s PBS containing 0.5% milk and 0.1% Tween 20, pH 7.4, at room temperature (RT) for 2 h. Individual serum samples were serially diluted 2-fold in blocking buffer and added to triplicate wells and the plates were incubated at RT for 1 h. Horseradish peroxidase (HRP)-conjugated sheep anti-mouse IgG, gamma chain specific (The Binding Site) was added and incubated at RT for an hour, followed by the addition of 2,2′-Azinobis [3-ethylbenzothiazoline-6-sulfonic acid]-diammonium salt (ABTS) HRP substrate (KPL) for 1 h at RT. The reaction was stopped by the addition of 1% SDS per well and the absorbance was measured at 450 nm. using an ELISA reader Spectramax (Molecular Devices). Positive (anti-RBD mouse mAb; BEIresources) and negative controls were included on each plate. The results are expressed as end point titers, defined as the reciprocal dilution that gives an absorbance value that equals twice the background value (wells that did not contain RBD or S-2P protein).

[0281] The mouse isotype ELISA were performed using a similar approach as above, but with the following differences. Only spike protein (S-2P) was used to coat the wells. The plates were blocked with PBS containing 0.2% bovine serum albumin (BSA), pH 7.4 for 30 minutes. The mouse serum samples were serially diluted in duplicates either 3- or 4-fold in PBS containing 0.2% BSA and 0.05% Tween 20, pH7.4. The secondary antibodies were HRP-conjugated AffiniPure Goat Anti-Mouse antibodies from Jackson ImmunoResearch specific for either Fcγ subclass 1, Fcγ subclass 2a, or Fcγ subclass 2c. The secondary antibodies were incubated for 30 minutes. TMB (3,3’,5,5′-Tetramethylbenzidine) substrate (Thermo) was added and the plates were incubated at RT for 5-10 minutes to allow color development. Stop solution (Thermo) was added and the absorbance was measured (450 nm) on a VersaMax microplate reader (Molecular Devices). The titration curves were interpolated to determine the dilution factor where A450=1.0, and the resulting values were used to calculate the IgG1/IgG2a ratio (for Balb/c mice) or IgG1/IgG2c ratio (for C57BL/6 mice).

[0282] Serum Cytokine Levels Measured by MSD: Cytokine levels were measured using V-Plex Plus Multi-Spot Assay plates, from Meso Scale Discovery (MSD, Rockville, MD). The mouse Pro-inflammatory panel containing IFN-γ, IL-4, IL-2, and TNF-α was used. Type 1 cytokines in the panel are IFN- γ, IL-2, and TNF-α, and Type 2 cytokine is IL-4. The kit included diluent, wash buffer, detection antibody solution and read buffer, as well as calibrators and controls for each analyte, from the manufacturer. Plates were washed three times with MSD wash buffer before the addition of MSD reference standard and calibrator controls used for quantifying antibody concentrations. Serum samples were diluted at 1:2 in MSD Diluent buffer, then added to wells in duplicate. Plates were incubated for 2 hours at RT with shaking at 350 rpm, then washed three times. MSD Detection Antibody Solution was added to each well, plates were incubated for 2 hours at RT with shaking at 350 rpm then washed three times. MSD 2x Read Buffer T was added to each well. Plates were read by MESO SECTOR S 120 Reader. Analyte concentration was calculated using DISCOVERY WORKBENCH® MSD Software and reported as picograms/mL.

[0283] SARS-CoV-2 pseudovirus neutralization assay: SARS-CoV-2 pseudovirions (PSV) were produced by co-transfection of HEK293T/17 cells with a SARS-CoV-2 S plasmid (pcDNA3.4) and an HIV-1 NL4-3 luciferase reporter plasmid. The S expression plasmid sequence was derived from the Wuhan seafood market pneumonia virus isolate Wuhan-Hu-1, complete genome (GenBank accession MN908947), and was codon optimized and modified to remove an 18 amino acid endoplasmic reticulum retention signal in the cytoplasmic tail to improve S incorporation into the pseudovirions and thereby enhance infectivity. Virions pseudotyped with the vesticular stomatitis virus (VSV) G protein were used as a non-specific control. Infectivity and neutralization titers were determined using ACE2-expressing HEK293 target cells (Integral Molecular) in a semi-automated assay format using robotic liquid handling (Biomek NXp Beckman Coulter). Test sera were diluted 1:40 in growth medium and serially diluted, then 25 µL/well was added to a white 96-well plate. An equal volume of diluted SARS-CoV-2 PSV was added to each well and plates were incubated for 1 hour at 37° C. Target cells were added to each well (40,000 cells/ well) and plates were incubated for an additional 48 hours. RLUs were measured with the EnVision Multimode Plate Reader (Perkin Elmer) using the Bright-Glo Luciferase Assay System (Promega Corporation). Neutralization dose-response curves were fitted by nonlinear regression using the LabKey Server, and the final titers are reported as the reciprocal of the dilution of serum necessary to achieve 50% neutralization (ID50, 50% inhibitory dose) and 80% neutralization (ID80, 80% inhibitory dose).

[0284] SARS-CoV-2 live-virus neutralization assay: SARS-CoV-2 strain 2019-nCoV/USA_WA1/2020 was obtained from the Centers for Disease Control and Prevention (gift of N. Thornburg). Virus was passaged once in Vero CCL81 cells (ATCC) and titrated by focus-forming assay on Vero E6 cells. Mouse sera were serially diluted and incubated with 100 focus-forming units of SARS-CoV-2 for 1 h at 37° C. Serum-virus mixtures were then added to Vero E6 cells in 96-well plates and incubated for 1 h at 37° C. Cells were overlayed with 1% (w/v) methylcellulose in MEM. After 30 h, cells were fixed with 4% PFA in PBS for 20 minutes at room temperature then washed and stained overnight at 4° C. with 1 µg/ml of antibody CR3022 in PBS supplemented with 0.1% saponin and 0.1% bovine serum albumin. Cells were subsequently stained with HRP-conjugated goat anti-human IgG for 2 h at room temperature. SARS-CoV-2-infected cell foci were visualized with TrueBlue peroxidase substrate (KPL) and quantified using ImmunoSpot microanalyzer (Cellular Technologies). Neutralization curves were generated using Prism software (GraphPad Prism 8.0).

[0285] Intracellular staining (ICS) and flow cytometry: Mice (n =5/time point) were euthanized on days 3, 5, 7, and 10 following immunization and spleens were collected. Single cell suspensions from individual immunized mice as well as from 5 unimmunized naïve mice (controls) were also prepared. Cells from each mouse were frozen at approximately 30 million cells/vial and placed in liquid nitrogen until use. Cryopreserved splenocytes were quickly thawed and added to 10 mL of complete RPMI 1640 media supplemented with 5% Fetal bovine serum and 1% Pen-strep followed by viability assessment by trypan blue exclusion method. Approximately, 1×106 cells were cultured in the presence of peptide pools directed towards SARS CoV-2 spike protein (JPT) (1ug/ml) in the presence of protein transport inhibitor (BD Golgi Plug™ containing Brefeldin A, 1 µg/ml, BD Biosciences) for 6 hours at 37° C., 5% CO2. For the positive control, cells were stimulated with phorbol 12-myristate 13-acetate (PMA; Sigma; 50 ng/ml final concentration) and ionomycin (I; Sigma; 1 µg/ml final concentration) while media served as a negative control. After the incubation period, cells were stained with LIVE/DEAD Fixable Aqua Dead Cell Stain Kit (Invitrogen), followed by surface staining with antibodies specific for the following cell surface markers (BUV737 anti-CD3 BUV395 anti-CD4, BV650 anti-CD69, BV711 anti-CD8, APC-H7 anti-CD45R/B220, PE-eFluor610 anti-CXCR5, PECY-7 anti-PD-1, BV785 anti- CCR7, BV605 anti- CD154) obtained from either BD Biosciences, Thermofisher Scientific or Biolegend. Following surface staining, cells were washed twice with FACS buffer. After washing, cells were fixed/permeabilized for 40 min at 4° C. in the dark using the eBioscience™ Intracellular Fixation & Permeabilization Buffer Set (Thermofisher Scientific) as per the manufacturer’s instructions. Cells were then incubated with a panel of intracellular antibodies specific for the following cytokines (V450 anti-IFN-γ, FITC anti-TNF-A, PerCP-Cy5 anti-IL-4, and PE anti IL-2) for 30 min at 4° C., washed twice, and resuspended in FACS buffer followed by acquisition on a BD FACS ARIA II (BD Biosciences, San Diego, CA) and analyzed with FlowJo software (Tree Star, San Carlos, CA). Appropriate single-color compensation controls and fluorescence minus one (FMO) controls were prepared simultaneously and were included in each analysis. Data are shown as bar graphs (Mean + SD). Significance between the two groups was determined by Mann-Whitney test.

[0286] Data Analysis: Data analyses used GraphPad (San Diego, CA) Prism software and statistical tests as described for individual experiments.

### Results and Discussion

### SpFN_1B-06-PL In Vitro Characterization

[0287] Structure by TEM: The assembly of SpFN_1B-06-PL as a central ferritin nanoparticle with 8 protruding SARS-CoV-2 Spike trimers was confirmed by negative-stain TEM. FIGS. 6 and 11 show reference-free 2D averages and 3D reconstruction of the research-grade SpFN_1B-06-PL immunogen with the expected spherical core and protruding SARS-CoV-2 spikes.

### Study #1 Immunogenicity of SpFN_1B-06-PL With Adjuvant ALFQ or Adjuvant Alhydrogel

[0288] Antibody responses to SARS-CoV-2: C57BL/6 or Balb/c mice were immunized with research grade (RG) SpFN_1B-06-PL intramuscularly with 10 µg of SpFN_1B-06-PL in alternating caudal thigh muscles 3 times, at 3-week intervals (week 0, 3, and 6) using either ALFQ or Alhydrogel as an adjuvant. All mice had robust serum binding responses to SARS-CoV-2 Spike, and RBD at each two-week timepoints following immunization, assessed by Octet Biolayer Interferometry and ELISA as shown in FIG. 14. Mouse sera from week 10 showed robust ACE2 blocking activity in an in vitro high-threshold SARS-CoV-2 RBD-ACE2 blocking assay shown in FIG. 15 with the ALFQ adjuvant groups showing higher levels of ACE2 inhibition.

[0289] Vaccination Neutralization Titers: Sera from immunized mice two weeks after each immunization were tested for neutralization against SARS-CoV-2 in a pseudovirus neutralization assay (FIG. 16). All vaccinated animal sera exhibited neutralizing activity. Both C57BL/6 and Balb/c mice strains immunized with SpFN_1B-06-PL + ALFQ showed neutralization titers ID₅₀ > 1,000 after a single immunization that increased to ID₅₀ > 10,000 after a second immunization and were maintained or slightly increased after a third immunization. In contrast, SpFN_1B-06-PL + Alhydrogel gave approximately 10-fold lower neutralization titers with neutralization titers ID₅₀ ~ 300 after a single immunization that increased to ID₅₀ > 1,000 after a second immunization and were maintained or slightly increased after a third immunization. Sera from mice immunized with SpFN_1B-06-PL with ALFQ were assessed for neutralization of SARS-CoV-2 in a live-virus neutralization assay. All immunized mice showed robust neutralization after a single immunization, averaging ~ 1,000 which was boosted by ~ 10-fold following a second immunization (FIG. 17). The neutralization titers showed a slight increase following a third immunization.

[0290] Serum Spike specific antibody isotype usage: Mouse sera was assayed for SARS-CoV-2 Spike-specific antibody response and the ratio of the isotypes, IgG2a or IgG2c (C57BL/6 and Balb/c have a different IgG2 subclass usage), and IgG1 - surrogates of TH1 and TH2 responses respectively (FIG. 22). A low ratio value for IgG2/IgG1 would indicate a TH2 bias, while a high ratio value would indicate a TH1 bias. In both mouse models when ALFQ was used as adjuvant, antibody isotype usage was very balanced with a slight ~2-fold TH1 bias in C57BL/6 mice.

### Study #2 Immunogenicity of a Low Dose of SpFN IB-06-PL With Adjuvant ALFQ

[0291] Antibody responses to SARS-CoV-2: In order to assess a lower dose of SpFN_1B-06-PL, C57BL6 or Balb/c mice were immunized with research grade (RG) SpFN_1B-06-PL intramuscularly with 0.08 µg of SpFN_1B-06-PL using ALFQ as an adjuvant. All mice had robust serum binding responses to SARS-CoV-2 Spike, and RBD at two-week timepoints following two immunizations, as shown in FIG. 18 and FIG. 19. Mouse sera from both adjuvant groups demonstrated robust neutralization activity in a pseudovirus neutralization assay against the homologous SARS-CoV-2 as shown in FIG. 20. Mouse sera from the SpFN_1B-06-PL + ALFQ group also showed robust live-virus neutralization, as shown in FIG. 21.

### Study #3 Serum Cytokine Response of SpFN_1B-06-PL With Adjuvant ALFQ

[0292] C57BL/6 mice were immunized with research grade (RG) SpFN_1B-06-PL intramuscularly with 10 µg of SpFN_1B-06-PL in alternating caudal thigh muscles twice, at 3 week intervals (week 0, and 3) using ALFQ as an adjuvant. Serum cytokine profiles at week 2 and week 6 were measured in these C57BL/6 mice immunized with SpFN_1B-06-PL + ALFQ and compared to the serum cytokine responses in Balb/c mice immunized in Study 1. A predominant TH1 cytokine response was observed in both mice types with IFN-gamma, IL-2, and TNF-alpha levels measured at week 2 and week 6 showing high levels, while serum IL-4 levels were observed at low levels as shown in FIG. 22.

### Study #4 T Cell Cytokine Response of SpFN_1B-06-PL With Adjuvant ALFQ and Alhydrogel

[0293] C57BL/6 mice were immunized with a single dose of 10 µg of research grade SpFN_1B-06-PL intramuscularly with of SpFN_1B-06-PL using either ALFQ or Alhydrogel as an adjuvant. Mice were euthanized and spleens were collected from 5 mice in each group on Days 3, 5, 7 and 10. Splenocytes were stimulated with SARS CoV-2 spike protein peptide pools, followed by incubation with cell surface marker antibodies and subsequent flow cytometry. Frequency of CD4 and CD8 T cells with cytokine secretion are shown in FIG. 23. Mouse cells from both adjuvant groups showed robust T cell responses with significant levels of TH1 type responses. Direct measurements of cytokine patterns in vaccine-induced T cells by intracellular cytokine staining (ICS) as shown by the Ifn-γ, IL-2, and TNF-α secreting cells exhibited a Th1-dominant response. The ALFQ adjuvant group showed higher frequency of CD4 and CD8 T cells with TH1 cytokine profiles.

### Conclusions

[0294] Research grade SpFN_1B-06-PL administered with either ALFQ or Alhydrogel adjuvants was shown to elicit antibodies that bound homologous SARS-CoV-2 S and RBD, inhibited ACE2 binding, and neutralized SARS-CoV-2 viruses in a pseudovirus assay and live virus assay. Immune responses were consistently higher when using ALFQ as an adjuvant. Use of a 0.08 µg SpFN_1B-06-PL dose with ALFQ adjuvant elicited high levels of binding and neutralizing antibodies at similar levels elicited by the higher 10 µg dose. These data indicate that SpFN_1B-06-PL with ALFQ is immunogenic in two mouse models. Analysis of antibody isotype usage in Spike-specific responses show a balanced TH1/TH2 type response with both IgG1 and IgG2 antibody subtypes in usage when the adjuvant ALFQ is used. In addition, serum cytokine profiles also indicated high levels of TH1 cytokine responses and analysis of spleen cells taken from C57BL/6 mice immunized with SpFN_1B-06-PL + ALFQ show increased frequency of Ifn-γ, IL-2, and TNF-α positive CD4 and CD8 T cells following vaccination indicative of a TH1 type immune response. The Ig subclass and T cell cytokine data together demonstrate that immunization with SpFN_1B-06-PL with ALFQ elicits a balanced TH1/TH2 response in contrast to the TH2-biased responses that have been linked to VAERD.

### Example 3 - SpFN and RBD-Ferritin Elicited Serum Provides Protective Immunity in K18-ACE2 Transgenic Mice

[0295] Animal models of SARS-CoV-2 infection are useful for characterizing vaccines and therapeutic intervention modalities and to enable understanding of mechanisms of diseases. With few exceptions, the disease pathology and severity in rodent and primate animal models does not approach the levels seen in humans. In order to develop a useful rodent model, Perlman and colleagues (McCray et al., Lethal infection of K18-hACE2 mice infected with severe acute respiratory syndrome coronavirus. J Virol. 2007 Jan; 81(2):813-21 and Zheng et al., COVID-19 treatments and pathogenesis including anosmia in K18-hACE2 mice. Nature. 2021 Jan; 589(7843):603-607) developed a transgenic mouse model which incorporated the human angiotensin-converting enzyme 2 (ACE2) in airway and other epithelia cells. The expression of ACE2 is hACE2 driven by the cytokeratin 18 (KRT18) promoter. ACE2 is the receptor for SARS-CoV-2 and SARS-CoV enabling human infection and in the K18-ACE2 transgenic mouse model, serves to enable reproducible infections following intranasal inoculation with a human strain of the virus. Depending on the SARS-CoV-2 viral dose utilized, the animals can exhibit disease leading to death.

[0296] In this study polyclonal IgG was purified from C57BL/6 mice that had been vaccinated with either SpFN_1B-06-PL (Week 6 - mice C826-C830) or RBD-Ferritin_pCoV131 (Week 17 -mice 581-590), and passively transferred three amounts of IgG from either immune serum to a set of K18-ACE2 transgenic mice, as well as naive IgG or PBS. Mice were infected with SARS-CoV-2 one day later and then monitored twice daily for clinical symptoms, weight loss and morbidity and or mortality.

[0297] Methods: Sera was purified from two groups of mice, SpFN_1B-06-PL-immunized or RBD-Ferritin_pCoV131-immunized. Sera from each group was pooled and measured for neutralization activity. The sera from each group was purified using ProteinG resin to isolate the polyclonal IgG. Sera was assessed for complete depletion and loss of RBD-binding activity, and the purified IgG was assessed for RBD-binding by Octet Biolayer Interferometry.

[0298] On study day -1 mice were injected intraperitoneally with the indicated amount of purified IgG from the pre-Immune Serum. On study day 0, all mice were infected with 4.1×104 PFU of SARS-CoV-2 USA-WA1/2020 via intranasal instillation. All mice were monitored for clinical symptoms and body weight twice daily, every 12 hours, from study day 0 to study day 14. Mice were euthanized if they displayed any signs of pain or distress as indicated by the failure to move after stimulated or inappetence, or if mice have greater than 20% weight loss compared to their study day 0 body weight.

### Results/Conclusions

[0299] To assess vaccine-elicited antibodies ability to prevent SARS-CoV-2 related mortality and morbidity in the K18-ACE2 mouse model, reducing amounts of purified IgG were transfused from either SpFN_1B-06-PL-immunized or RBD-Ferritin-immunized mice (FIG. 24 and Table 7). Animals were challenged one day following antibody transfusion, and the serum neutralizing antibody titer assessed. The challenged mice were assessed for change in body weight and mortality over 14 days following challenge. Since the C57BL/6 vaccinated mice showed high neutralization titers, and in an effort to understand the levels of antibody that provide protection, and the levels that would allow SARS-CoV-2 related mortality, levels of antibody with neutralization ID50 > 1,000, and decreasing to <40 were provided (Table 7). These amounts are significantly lower than levels observed following SpFN_1B-06-PL or RBD-Ferritin_pCoV131 vaccination. K18-ACE2 mice that received the highest antibody amounts from either SpFN-1B-06-PL-vaccinated animals or RBD-Ferritin_pCoV131-vaccinated animals did not show body weight loss, and all survived. Mice that received approximately one tenth that level of antibody, also showed significant levels of survival, 80% for the SpFN_1B-06-PL group, and 60% for the RBD-Ferritin_pCoV131 group. Animals that received the lowest amount of antibody, did not show any increased antibody-enhanced rates of morbidity or mortality, and in both group3, and 6, a single animal survived. All animals in both control groups succumbed to disease by day 8 post-challenge. In conclusion, passive transfer of antibody alone from either SpFN_1B-06-PL- or RBD-Ferritin_pCoV131-vaccinated animals is suitable to provide protection from SARS-CoV-2 morbidity, and mortality in the K18-ACE2 mouse model.

TABLE 7

Experimental design, pseudovirus neutralization titer and survival percentage

| Group | Immunogen | Animal sera type | Pooled sera neut (ID50) prior to purification | Amount of purified IgG transferred (ug/mouse) | GMT of sera at time of challenge | % survival |
|---|---|---|---|---|---|---|
| 1 | pCoV1B-06-PL | SpFN_1B-06PL-immunized | 33106 | 470 | 1713 | 100 |
| 2 | pCoV1B-06-PL | SpFN_1B-06PL--immunized | 33106 | 47 | 89 | 80 |
| 3 | pCoV1B-06-PL | SpFN_1B-06PL--immunized | 33106 | 5 | <40 | 10 |
| 4 | pCoV131 | RBD-Ferr_pCoV131 immunized | 23126 | 370 | 1179 | 100 |
| 5 | pCoV131 | RBD-Ferr_pCoV131 immunized | 23126 | 37 | 248 | 60 |
| 6 | pCoV131 | RBD-Ferr_pCoV131 immunized | 23126 | 4 | <80 | 10 |
| 7 | N/A | Naive IgG | N/A | N/A | <80 | 0 |
| 8 | N/A | PBS | N/A | N/A | <80 | 0 |

[0300] Each of the 8 study groups contained 5 male and 5 female mice.

### Example 4 - Immunization of Mice With SARS-CoV-2 Immunogens Provides a Broadly Neutralizing Immune Response

[0301] As shown in FIG. 25, mouse sera from animals immunized with SARS-CoV-2 nanoparticles including but not limited to SpFN_1B-06-PL, RBD-Ferritin_pCoV131, and S1-Ferritin_pCoV111 showed binding response as measured by Octet Biolayer Interferometry to the RBD of the homologous SARS-CoV-2 RBD, but also measurable binding to the distantly related SARS-CoV-1 virus. The levels of binding are greater than 0.5 nm which based on the correlation of Octet binding response to RBD molecules and pseudovirus neutralization as shown in FIG. 12 indicated that this level of binding would indicate significant neutralization activity in the mouse sera. In addition, binding was measure for the mouse sera to a set of RBD variant mutations that match to mutations observed in circulating strains of SARS-CoV-2 including mutations at residue 417, 484, and 501. In all tested cases, no dramatic change was seen in the binding responses between SARS-CoV-2 RBD or versions that had mutations.

[0302] As shown in FIG. 26, the mouse sera was measured for pseudovirus neutralization activity against SARS-CoV-2 and SARS-CoV-1 and saw high levels of neutralization ID50 titers of >1,000 for the animals immunized with SpFN_1B-06-PL and >3,000 for the RBD-Ferritin_pCoV131 immunized mice.

### Example 5 - Non-Human Primate Immunogenicity and Efficacy

[0303] The Spike protein is a surface protein of Severe Acute Respiratory Syndrome associated Coronavirus 2 (SARS-CoV and attaches to human angiotensin converting enzyme (ACE)-2 cell surface receptors facilitating human infection. Antibodies that can bind to the Spike glycoprotein and prevent interaction with the ACE2 receptor can facilitate protection from infection. The present inventors developed a Spike Ferritin Protein Nanoparticle with ALFQ adjuvant (SpFN_1B-06-PL + ALFQ) vaccine to elicit protective antibody responses. Ferritin is a naturally occurring protein that self-assembles into a 24-member spherical particle, made up of multiple three-fold, four-fold and two-fold axes. Using the 3-fold axes, 8 trimeric SARS-CoV-2 Spike glycoproteins are presented on the surface of the self-assembling protein nanoparticle surface. The ALFQ adjuvant, a liposomal formulation containing the QS-21 saponin, was developed by the Laboratory of Adjuvant and Antigen Research (LAAR) at Walter Reed Army Institute of Research (WRAIR). It is a liposomal formulation containing MPLA and QS-21 saponin. In this study in Chinese-origin rhesus macaques, the Spike Ferritin nanoparticle pCoV-1B-06-PL elicited antibodies that bind to SARS-CoV-2 Spike and Receptor-Binding domain (RBD), neutralize homologous SARS-CoV-2 in a pseudovirus assay, and inhibit Spike and RBD binding to the human ACE-2 receptor. In addition, following respiratory tract SARS-CoV-2 challenge, vaccinated animals were protected from infection as evidenced by lack of viral replication in the upper and lower airways.

### List of Abbreviations

[0304] SpFN: Spike Ferritin Nanoparticle
[0305] RBD: Receptor-binding domain
[0306] MPLA: monophosphoryl lipid A
[0307] NHP: Nonhuman primate
[0308] ACE-2: angiotensin-converting enzyme 2
[0309] NP: nasopharyngeal
[0310] BAL: bronchoalveolar lavage
[0311] TND: target not detected

[0312] Introduction: In order to extend observations made in murine models evaluating the immunogenicity of SpFN adjuvanted with ALFQ, here the immunogenicity and efficacy of ALFQ-adjuvanted SpFN was investigated in rhesus macaques. Immune responses elicited in nonhuman primate (NHP) species are expected to resemble those in humans due to close genetic similarity. Moreover, NHP species offer an important model for evaluating the effect of SARS-CoV-2 vaccines on viral replication in both upper and lower airways. Important questions addressed here include the dose of immunogen required to elicit protective immune responses, and whether a single immunization is sufficient to mount robust responses and protection.

### Objectives

[0313] Measure humoral immune responses in rhesus macaques vaccinated with SpFN_1B-06-PL adjuvanted with ALFQ, including SARS-CoV-2-specific binding and neutralizing antibodies.
[0314] Compare immune responses following two versus one SpFN_1B-06-PL immunization
[0315] Compare immune responses elicited by 50 µg versus 5 µg SpFN_1B-06-PL
[0316] Assess protective efficacy against intranasal/intratracheal SARS-CoV-2 challenge in SpFN_1B-06-PL vaccinated macaques

### Materials and Methods

### Materials

[0317] SpFN_1B-06-PL: Endotoxin-free, research grade material was used for vaccinations. Research-grade SpFN_1B06-PL was produced by transient expression in Expi293F cells (ThermoFisher Scientific) using the same expression construct sequence as that used to create the SpFN_1B06-PL cGMP manufacture of clinical drug product. Culture supernatant was harvested four days post-transfection and purified by GNA-lectin affinity chromatography and size-exclusion chromatography. Purified research grade SpFN_1B06-PL was formulated in PBS at 1 mg/ml.

[0318] ALFQ: ALFQ liposomes (human dose) contained 200 µg/mL 3D-PHAD (MPLA:PL=1:88; Avanti Polar Lipids) and 100 ug/mL QS-21 (Desert King International), 11.45 mM phospholipids (DMPC:DMPG=9:1), 55% cholesterol, 200 µg/mL 3D-PHAD. ALFQ was gently mixed by slow speed vortex prior to use.

[0319] All reagents were equilibrated to room temperature before use. Antigen was diluted to 0.1 mg/mL in dPBS (Lot#723188, Quality Biological) and mixed 1:1 (50 µg dose) or 1:10 (5 µg dose) with 2X ALFQ liposomes on a tilted roller at slow speed at room temperature for 10 min, followed by incubation at 4° C. for 50 min. Immunizations were performed within 3 hours of vaccine formulation.

[0320] SARS-CoV-2 challenge stock: SARS-CoV-2 virus (strain 2019-nCoV/USA-WA1/2020, Lot# 70038893, 1.99 × 10⁶ TCID₅₀/mL) used for rhesus challenge was obtained from NIAID. Virus was stored at -80° C. prior to use, thawed by hand and placed immediately on wet ice. Stock was diluted to 5×10⁵ TCID₅₀/mL in PBS and vortexed gently for 5 seconds prior to inoculation of macaques.

### Methods

[0321] TEST ANIMAL HOUSING AND CARE: Thirty-two male and female specific-pathogen-free, research naive Chinese-origin rhesus macaques were acquired. In vivo procedures were carried out in accordance to institutional, local, state, and national guidelines and laws governing research in animals including the Animal Welfare Act. Animal protocols and procedures were reviewed and approved by the Animal Care and Use Committee of both the US Army Medical Research and Material Command (USAMRMC, protocol 11355007.03) Animal Care and Use Review Office as well as the Institutional Animal Care and Use Committee of Bioqual, Inc. (protocol number 20-092), where non-human primates were housed for the duration of the study. Bioqual, Inc. and the USAMRMC are both accredited by the Association for Assessment and Accreditation of Laboratory Animal Care and are in full compliance with the Animal Welfare Act and Public Health Service Policy on Humane Care and Use of Laboratory Animals.

[0322] ANIMAL STUDY DESIGN AND PROCEDURES: Thirty-two rhesus macaques (n=8/group) were immunized intramuscularly with either 50 or 5 µg of SpFN_1B-06-PL in alternating anterior proximal quadricep muscles. SpFN was administered in a 1.0 mL dose formulated in ALFQ. Study groups, balanced for animal sex and weight, were as follows:
[0323] PBS
[0324] SpFN_1B-06-PL (50ug) + ALFQ adjuvant, prime+boost
[0325] SpFN_1B-06-PL (5ug) + ALFQ adjuvant, prime+boost
[0326] SpFN_1B-06-PL (50ug) + ALFQ adjuvant, 1 immunization (study week 4)

[0327] Immunizations were administered twice 4 weeks apart (groups 2-3) or once (group 4). Blood was collected every 2 weeks following each immunization for 8 weeks. Serum was stored at -80° C. until analysis. Antibody responses were analyzed by Octet Biolayer Interferometry, MSD, pseudovirus neutralization, and wild-type live virus neutralization assays. Animals were challenged at study week 8 via combined intratracheal (IT, 1.0 mL) and intranasal (IN, 0.5 mL per nostril) inoculation of a 10⁶ TCID50 dose of SARS-CoV-2 strain 2019-nCoV/USA-WA1/2020. The IN/IT challenge route was selected due to its widespread usage and establishment as the current standard in the field for NHP challenge studies. The 10⁶ TCID50 dose was intended to provide a rigorous challenge model with robust viral replication in all control animals. Animals were followed for 7 (N=16) or 14 days (N=16) following challenge. Respiratory tract specimens, nasopharyngeal (NP) swabs and bronchoalveolar lavage (BAL), were collected to assess viral replication in the upper and lower airways, respectively, at days 1, 2, 4, 7, 10, and 14 post-challenge.

### Experimental Procedures

[0328] Octet Biolayer Interferometry: All biosensors were hydrated in PBS prior to use. All assay steps were performed at 30° C. with agitation set at 1,000 rpm in a Octet 96red instrument (ForteBio). Baseline equilibration of the anti-His-tag biosensors (HIS1K biosensors with a conjugated Penta-His antibody (ForteBio)) was carried out using assay buffer (PBS) for 15 s, prior to SARS-CoV2-RBD (30ug/ml diluted in PBS) loading for 120 s. After briefly dipping in assay buffer (15 s in PBS), the biosensors were dipped in the mouse sera samples (100-fold dilution) for 180 s. The binding response (nm) at 180 s was recorded for each sample.

[0329] Binding antibody measurements by MSD: SARS-CoV-2-specific binding IgG antibody responses were measured using MULTI-SPOT® 96-well plates, (Meso Scare Discovery [MSD}, Rockville, MD). Multiplex wells were coated with three SARS-CoV-2 antigens, Spike, RBD and Nucleocapsid (S, RBD and N) at a concentration of 200-400 ng/ml and BSA which served as a negative control. 4 plex MULTISPOT plates were blocked with MSD Blocker A buffer for 1 hour at room temperature (RT) while shaking at 700 rpm. Plates were washed with MSD wash buffer before the addition of MSD reference standard and calibrator controls used for quantifying antibody concentrations. Serum samples were diluted at 1:1,000 - 1:100,000 in MSD Diluent buffer, then added to each of four wells. Plates were incubated for 2 hours at RT with shaking at 700 rpm, then washed. MSD SULFO-TAG™ anti-IgG antibody was added to each well, plates were incubated for 1 hour at RT with shaking at 700 rpm, washed, then MSD GOLDTM Read buffer B was added to each well. Plates were read by MESO SECTOR S 120 Reader. IgG concentration was calculated using DISCOVERY WORKBENCH® MSD Software and reported as arbitrary units (AU)/mL.

[0330] ACE-2 binding inhibition antibody measurements by MSD: SARS-CoV-2 Spike-specific binding antibody responses able to inhibit Spike or RBD binding to the ACE-2 receptor competition were measured using MULTI-SPOT® 96-well plates (MSD}, Rockville, MD). Antigen-coated plates were blocked and washed as described above. Assay calibrator and samples were diluted at 1:25-1:1,000 in MSD Diluent buffer, then added to the wells. Plates were incubated for 1 hour at RT with shaking at 700 rpm. ACE2 protein conjugated with MSD SULFO-TAG™ was added, plates were incubated for 1 hour at RT with shaking at 700 rpm. Plates were washed and read as described above. Percent inhibition was calculated relative to the assay calibrator (maximum 100% inhibition). AU/mL concentration of the inhibitory antibody was calculated with DISCOVERY WORKBENCH® MSD Software.

[0331] SARS-CoV-2 pseudovirus neutralization assay: SARS-CoV-2 pseudovirions (PSV) were produced by co-transfection of HEK293T/17 cells with a SARS-CoV-2 S plasmid (pcDNA3.4) and an HIV-1 NL4-3 luciferase reporter plasmid. The S expression plasmid sequence was derived from the (Wuhan strain) genome (GenBank #), and was codon optimized and modified to remove an 18 amino acid endoplasmic reticulum retention signal in the cytoplasmic tail to improve S incorporation into the pseudovirions and thereby enhance infectivity. Virions pseudotyped with the vesicular stomatitis virus (VSV) G protein were used as a non-specific control. Infectivity and neutralization titers were determined using ACE2-expressing HEK293 target cells (Integral Molecular) in a semi-automated assay format using robotic liquid handling (Biomek NXp Beckman Coulter). Test sera were diluted 1:40 in growth medium and serially diluted, then 25 µL/well was added to a white 96-well plate. An equal volume of diluted SARS-CoV-2 PSV was added to each well and plates were incubated for 1 hour at 37° C. Target cells were added to each well (40,000 cells/ well) and plates were incubated for an additional 48 hours. RLUs were measured with the EnVision Multimode Plate Reader (Perkin Elmer) using the Bright-Glo Luciferase Assay System (Promega Corporation). Neutralization dose-response curves were fitted by nonlinear regression using the LabKey Server, and the final titers are reported as the reciprocal of the dilution of serum necessary to achieve 50% neutralization (ID50, 50% inhibitory dose) and 80% neutralization (ID80, 80% inhibitory dose).

[0332] SARS-CoV-2 live-virus neutralization assay: SARS-CoV-2 strain 2019-nCoV/USA WA1/2020 was obtained from the Centers for Disease Control and Prevention (gift of N. Thornburg). Virus was passaged once in Vero CCL81 cells (ATCC) and titrated by focus-forming assay on Vero E6 cells. Rhesus sera were serially diluted and incubated with 100 focus-forming units of SARS-CoV-2 for 1 hr at 37° C. Serum-virus mixtures were then added to Vero E6 cells in 96-well plates and incubated for 1 hr at 37° C. Cells were overlaid with 1% (w/v) methylcellulose in MEM. After 30 hrs, cells were fixed with 4% PFA in PBS for 20 minutes at room temperature then washed and stained overnight at 4° C. with 1 µg/ml of antibody CR3022 in PBS supplemented with 0.1% saponin and 0.1% bovine serum albumin. Cells were subsequently stained with HRP-conjugated goat anti-human IgG for 2 hrs at room temperature. SARS-CoV-2-infected cell foci were visualized with TrueBlue peroxidase substrate (KPL) and quantified using ImmunoSpot microanalyzer (Cellular Technologies). Neutralization curves were generated using Prism software (GraphPad Prism 8.0).

[0333] Antigen-specific T cell intracellular cytokine staining (ICS): Cryopreserved PBMC were thawed, rested for 6 h in R10 with 50 U/ml Benzonase Nuclease (Sigma-Aldrich), and stimulated with peptide pools for 12 h. Stimulations consisted of either SARS-CoV-2 Spike or Nucleoprotein peptide pools (1 µg/ml, JPT, PM-WCPV-S And PM-WCPV-NCAP respectively) in the presence of Brefeldin A (0.65 µl/ml, GolgiPlugTM, BD Cytofix/Cytoperm Kit, Cat. 555028), co-stimulatory antibodies anti-CD28 (BD Biosciences Cat. 555725 1 ug/ml) and anti-CD49d (BD Biosciences Cat. 555501; 1 ug/ml) and CD107a (H4A3, BD Biosciences Cat. 561348, Lot 9143920). Following stimulation, cells were stained serially with LIVE/DEAD Fixable Blue Dead Cell Stain (ThermoFisher #L23105) and a cocktail of fluorescent-labeled antibodies (BD Biosciences unless otherwise indicated) to cell surface markers CD4-PE-Cy5.5 (S3.5, ThermoFisher #MHCD0418, Lot 2118390), CD8-BV570 (RPA-T8, BioLegend #301038, Lot B281322), CD45RABUV395 (5H9, #552888, Lot 154382 and 259854), CD28 BUV737 (CD28.2, #612815, Lot 0113886), CCR7-BV650 (GO43H7, # 353234, LotB297645) and HLA-DR BV480 (G46-6, # 566113, Lot 0055314). Intracellular cytokine staining was performed following fixation and permeabilization (BD Cytofix/Cytoperm, Becton Dickenson) with CD3-Cy7APC (SP34-2, #557757, Lot 6140803), CD154-Cy7PE (24-31, BioLegend # 310842, Lot B264810), IFNy-AF700 (B27, # 506516, LotB187646), TNFα-FITC (MAb11, # 554512, Lot 15360), IL-2-BV650 (MQ1-17H12, BioLegend #500334, Lot B214940), IL-4 BB700 (MP4-25D2, Lot 0133487), MIP-1b (D21-1351, # 550078, Lot 9298609), CD69-ECD (TP1.55.3, Beckman Coulter # 6607110, Lot 7620070), IL-21-AF647 (3A3-N2.1, # 560493, Lot 9199272), IL-13-BV421 (JES10-5A2, # 563580, Lot 9322765) and IL-17a-BV605 (BL168, Biolegend #512326, B289357). Sample staining was measured on a FACSymphony™ A5 SORP (Becton Dickenson) and data analyzed using FlowJo v.9.9 software (Tree Star, Inc.). CD4 and CD8 T cell subsets were pre-gated on memory markers prior to assessing cytokine expression as follows: single-positive or double-negative for CD45RA and CD28. Boolean combinations of cells expressing one or more cytokines were used to calculate the sum total of antigen-specific memory CD4 or CD8 T cells. Statistical analysis and display of multicomponent distributions were performed with SPICE v6.0 (NIAID, NIH).

[0334] SARS-CoV-2 Sub-genomic messenger (sgm) and viral load RNA quantitative assays: RT-qPCR assays were developed targeting the Envelope (E) gene region of SARS-CoV-2 for sgmRNA and viral load RNA quantification. The sgmRNA assay uses the subgenomic (sg) Leader sequence as the forward primer (SARS-CoV-2 sg Leader) in combination with SARS-CoV-2 TAL E1 reverse (R) and SARS-CoV-2 TAL E1 Probe for amplification of the E gene messenger RNA. Quantitative amplification for viral load is performed using the SARS-CoV-2 TAL E1 forward (F) primer with SARS-CoV-2 TAL E1 R and SARS-CoV-2 TAL E1 Probe. All primers and probes are listed in Table 8.

TABLE 8

Primers and Probes for SARS-CoV-2 sgmRNA and Viral Load Assays

| Primer/Probe Name | Sequence 5′- 3′ | Nucleotide Length |
|---|---|---|
| SARS-CoV-2 TAL E1 F | TCGTGGTATTCTTGCTAG | 18 |
| SARS-CoV-2 TAL E1 R | GAAGGTTTTACAAGACTCAC | 20 |
| SARS-CoV-2 TALE1 Probe | FAM -ACACTAGCCATCCTTACTGCG-BHQ1 | 21 |
| SARS-CoV-2 sg Leader | CGATCTCTTGTAGATCTGTTCTC | 23 |
| MS2 F | CTCTGAGAGCGGCTCTATTGG | 21 |
| MS2 R | GTTCCCTACAACGAGCCTAAATTC | 24 |
| MS2 Probe | JOE-TCAGACACGCGGTCCGCTATAACGAT- BHQ2 | 26 |
| T7-Leader Forward | TAATACGACTCACTATAGGGGAATTGTGCGTGGATGAG GCGATCTCTTGTAGATCTGTTCTC | 62 |

F=forward; R=reverse

[0335] An RNA transcript for the SARS-CoV-2 envelope gene was used as a calibration standard. T7-Leader and SARS-CoV-2 TAL E1 R primers amplified a 237 base pair sgm E RNA. sgm E RNA transcripts were generated from the T7 - Leader E gene PCR product using the MEGAscript™ T7 Transcription Kit (AM1333: Thermo Fisher Scientific, Inc. Carlsbad, CA). Avogadro’s number was used to convert the sgm E RNA standard concentration from µg/ml to copies/ml.

[0336] RNA was extracted from 200 µl of Nasopharyngeal (NP) swab media or Bronchoalveolar Lavage (BAL) specimens using the EZ1 DSP Virus kit (62724: QIAQEN) on the EZ1 Advanced XL instrument (9001874: QIAGEN). Samples were lysed in 200 µl of ATL buffer (19076: QIAGEN), then transferred to the Qiagen EZ1 for extraction. Bacteriophage MS2 (ATCC, Manassas, VA) was added to the RNA carrier and used as an Extraction Control to monitor the efficiency of RNA extraction and amplification. Purified RNA was eluted in 90 µl. A SARS-CoV-2 negative control (NEG) and two contrived SARS-CoV-2 positive controls at 1E6 HIGH and 1E3 LOW concentrations were extracted in each run and used to assess performance of both assays.

[0337] The RT-qPCR amplification reactions were performed in separate wells on a 96-well Fast plate for the 3 targets: sgmRNA, RNA viral load, and MS2 RNA. Extraction Controls (NEG, HIGH and LOW) and no template control (NTC) for each primer/probe set were included on each plate. RT-qPCR reactions contained 0.72 uM each Primer and 0.2 uM probe and 1x TaqPath™ 1-Step RT-qPCR (A15299: Life Technologies, Thermo Fisher Scientific, Inc.); amplification was performed on the 7500 Fast Dx thermocycler (4406985: Applied Biosystems, Thermo Fisher Scientific, Inc.). Ten-fold serial dilutions of the sgm E RNA standard in 20 ng/µl t-RNA (stabilizer) was performed to generate calibrators at 1E6, 1E5, 1E4, 1E3, 1E2 and 1E1 RNA copies/10 µl; RNA calibration standards were amplified in duplicate to generate the standard curve. Ten µl of sample RNA and calibration standards were amplified using the following cycling conditions: 2 min at 25° C., 15 min at 50° C., 2 min at 95° C. and 45 cycles of 3 sec at 94° C. and 30 sec at 55° C. with fluorescent read at 55° C. RNA copy values were extrapolated from the standard curve and multiplied by 45 to obtain RNA copies/ml.

[0338] Validity of the RT-qPCR result was based upon the following criteria: 1) slope of standard curve, 2) Y intercept, 3) value of high copy SARS-CoV-2 control, 4) value of low copy SARS-CoV-2 control, 5) cycle threshold (C_{T}) value for the MS2 phage extraction control 6) no SARS-CoV-2 amplification in NTC and negative extraction controls, and 7) MS2 target must be detected in all extracted RNA samples.

### Results

### Immunogenicity of SpFN or RBD-Ferritin Adjuvanted With ALFQ in Rhesus Macaques

[0339] Binding antibody responses to SARS-CoV-2 and SARS-CoV-1: Rhesus macaques were immunized with research grade SpFN_1B-06-PL or RBD-Ferritin intramuscularly at doses of 50 or 5 µg of SpFN_1B-06-PL in alternating anterior proximal quadricep muscles twice (weeks 0 and 4) or once for SpFN_1B-06-PL (50 µg dose at study week 4). Immunogens were formulated with ALFQ adjuvant (human dose). All macaques mounted serum binding responses to SARS-CoV-2 Spike at all time points following immunization as measured by Octet and by MSD (FIG. 27 and FIGS. 31-32). Greater magnitude responses were elicited by the 50 µg dose than by 5 µg and titers were generally sustained from 2 to 4 weeks post-immunization at both doses. Responses increased following boosting by ~10-fold, regardless of dose. Lower levels of antibody responses to the SARS-CoV-1 RBD molecule were observed, but a similar pattern held, with the higher dose immunizations resulting in higher immune responses.

[0340] Binding antibody responses to SARS-CoV-2 that inhibit ACE-2 receptor engagement: To assess the ability of SARS-CoV-2-specific humoral responses to block binding between the viral Spike protein and the ACE-2 host cellular receptor, serum was evaluated for activity in an ACE-2 inhibition assay using the MSD platform. SpFN_1B-06-PL and RBD-Ferritin immunization elicited antibody responses that blocked interaction of both the Spike and RBD subunit with the ACE-2 receptor (FIG. 27 and FIGS. 31-32). Inhibitory responses to the priming immunization were robust following immunization with either 50 µg or 5 µg doses (FIG. 27). Boosting increased responses by >10-fold at both doses and responses were well-maintained between 2 and 4 weeks following each immunization.

[0341] Pseudovirus neutralizing antibody responses: To evaluate antibody responses able to neutralize SARS-CoV-2 Spike, a pseudovirus neutralization assay was performed with sera collected at weeks 0, 2, 4, 6 and 8. All vaccinated animal sera exhibited neutralizing activity (FIG. 27). For the SpFN 50 µg dose group, geometric mean IC50 titers ranged from 300-20,000 (median 3315) and IC80 titers ranged from 100-2,700 (median 600). Neutralization titers in the SpFN_1B-06-PL 5 µg dose group were ~10-fold lower. Similar responses were seen for the RBD-Ferritin immunized animals. Responses were maintained several weeks following vaccination. Homologous boosting increased neutralizing responses by ~20- and ~70-fold for the high- and low-dose animals, respectively, achieving IC80 titers of ~10,000 and 5,000.

[0342] Live-virus neutralizing antibody responses: Neutralizing activity was also assessed using a live-virus assay with wild-type, intact SARS-CoV-2 in sera collected at weeks 0, 4, and 8. Vaccination with 50 µg of SpFN_1B-06-PL resulted in serum neutralizing activity following a single immunization, with reciprocal EC₅₀ GMTs of 581 at week 4 (FIG. 27). Following the boosting immunization, GMTs were 8,455 and 3,395 in animals vaccinated with 50 or 5 µg, respectively. Similar responses were seen for the RBD-Ferritin immunized animals. Neutralization of a wild-type, intact SARS-CoV-1 was also assessed with sera collected at weeks 6. ID90 titers for the majority of animals immunized twice had GMT titers of ~1,000 (FIG. 28). FIG. 34 shows the live-virus neutralization assay for SARS-CoV-2 assessed responses in serum 4 weeks following each immunization.

[0343] Live-virus neutralizing antibody responses against SARS-CoV-2 strains B1.1.7 and B1.351: Neutralizing activity was also assessed using a live-virus assay with wild-type, intact SARS-CoV-2 variants with sera collected at weeks 0, and 6 (FIG. 35).

[0344] Antigen-specific T cell responses: SARS-CoV-2 Spike-specific T cells were assessed by in vitro stimulation of PBMC collected at weeks 0 and 6 with Spike peptide pools followed by intracellular cytokine staining (ICS). Prime-boost vaccination with 50 µg of SpFN_1B-06-PL or RBD-Ferritin_ppCoV131 generated Spike-specific CD4 T cells exhibiting a type 1 T helper (Th1) profile based on expression of TNFα, INFγ, and IL-2 in all animals (FIGS. 29, 36-38), ranging from ~1-18% of memory CD4 T cells. Single immunization with the 50 µg dose or prime-boost vaccination with the 5 µg dose elicited responses in most animals. Limited type 2 T helper (Th2) responses were observed by ICS for IL-4 and IL-13 and averaged ~10-fold lower in magnitude than Th1 responses. Analysis of the ratio of Th1 to Th2 cell responding cells indicated that both SpFN and RFN-vaccination elicited a predominant Th1 type response (FIG. 39).

[0345] Effector Binding antibody responses to SARS-CoV-2: To assess the ability of SARS-CoV-2-specific humoral responses to facilitate cell effector functions such as Opsonization, ADCD, ADCP, ADNP, and trogocytosis, were measured at week 0 - 8. Robust effector functions were clearly observable following the initial immunization, and the subsequent second immunization boosted these immune responses (FIG. 40).

### Efficacy of SpFN Adjuvanted With ALFQ in Rhesus Macaques Following SARS-CoV-2 Challenge

[0346] SARS-CoV-2 replication in respiratory tract: To evaluate vaccine efficacy against infection, macaques were challenged with high-dose 10⁶ TCID50 SARS-CoV-2 via the IN/IT routes four weeks after the boost (study week 8). Viral infection was assessed by RT-qPCR for viral subgenomic mRNA (sgmRNA) and total RNA in both NP swabs and BAL collected days 1, 2, 4, and 7 post-challenge. Half of the animals were also monitored at days 10 and 14 post-challenge. Total RNA includes genomic nucleic acid abundant in virions introduced by the challenge inoculum, while sgmRNA is considered a more specific indicator of active replication. All control animals showed evidence of robust infection with high levels of sgmRNA and total RNA in NP swabs, BAL and saliva from days 1-7 (FIGS. 30 and 41). In contrast, animals vaccinated with two doses of 50 µg SpFN or RFN showed little to no evidence of viral replication in both NP swabs and BAL. sgmRNA was not detected in BAL for 8 of 8 animals by day 2 and in NP swabs of 5 of 8 animals by day 2 and all animals by day 4. Viral replication was also minimal in the prime-boost 5 µg dose and single 50 µg dose groups, with very low or undetectable sgmRNA by day 4 in most animals.

[0347] Lung pathology: Unvaccinated control animals developed histopathologic evidence of multifocal, moderate interstitial pneumonia at 7 days after challenge (FIGS. 31, 42, and 43). The pneumonia was characterized by type II pneumocyte hyperplasia, alveolar septal thickening, edema and necrotic debris, pulmonary macrophage infiltration and vasculitis of smaller caliber blood vessels. None of the vaccinated animals had evidence of interstitial pneumonia. Immunohistochemistry revealed viral antigen in alveolar pneumocytes and pulmonary macrophages in at least one lung section of every control animal (FIGS. 27, 42, and 43). No viral antigen was detected in any vaccinated animals (FIGS. 31, 42, and 43).

### Conclusions

[0348] Research grade SpFN_1B-06-PL or RBD-Ferritin formulated with ALFQ adjuvant given at 5 or 50 µg doses twice, or in a single dose of 50 µg, elicited in all animals sera that bound to the SARS-CoV-2 Spike protein and RBD subunit. These responses were maintained for at least four weeks following both the prime as well as the boost. In addition, the sera neutralized SARS-CoV-2 pseudovirions and live virus from multiple variants, SARS-CoV-1 pseudovirus and live virus, and also inhibited binding of SARS-CoV-2 Spike and RBD to the host cell ACE-2 receptor. Spike-specific CD4 Th1 T cell responses were present in PBMC, while Th2 responses were limited. Following high dose SARS-CoV-2 respiratory tract challenge, viral replication was not detectable in the lower airways (BAL) by day 2 in 17 of 24 SpFN_1B-06-PL vaccinated animals, while controls exhibited consistent and robust replication. In the upper airways, no viral replication was observed 15 of 24 vaccinated animals by day 4, including all 8 animals vaccinated twice with 50 µg SpFN₋1B-06-PL. No enhanced disease outcomes were observed in vaccinated rhesus macaques compared to control animals. These data demonstrate that ALFQ adjuvanted SpFN-1B-06-PL and RBD-Ferritin is immunogenic and efficacious in a macaque model.

### Example 6 - Immunization of Mice With a Mixture of SARS-CoV-2 Immunogen and SARS-CoV-1 Immunogens Provides a Broadly Neutralizing Immune Response

[0349] In order to assess whether SARS-CoV-2 immunogens could be combined with SARS-CoV-1 immunogens and whether the design procedure could be translated to other β-coronaviruses including SARS-like coronaviruses, a SARS-CoV-1 immunogen was designed based on the SARS-COV-2 SpFN_1B-06-PL format.

[0350] This SpFN_SARS-CoV-1 immunogen (SEQ ID NO: 255) was produced and purified in a similar manner as that described for the SARS-CoV-2 Spike Ferritin immunogens. A set of BALB/c and C57BL/6 mice was then immunized using two dose amounts (10 µg total or 2 µg total), which was a 50:50 mixture of the two immunogens. The resulting immune response was then analyzed in these animals for antibody responses.

[0351] As shown in FIG. 44 and FIG. 45 and Table 9, mouse sera from animals immunized with the combination SARS-CoV-1 and SARS-CoV-2 SpFN immunogens produced high binding and high pseudovirus neutralizing titers against both SARS-CoV-1 and SARS-CoV-2 indicating that there was no immune competition between the two immunogens and that robust broad immune responses could be elicited in vivo with pseudovirus neutralization ID50 titers ranging from 10,000 to more than 20,000.

TABLE 9

SARS-CoV-1 pseudovirus neutralization GMT titers

| Animal Identifiers | Immunogen | Vaccine Dose (µg) | Mouse strain | Adjuvant | Immunization Schedule | Week 2 ID50 ID80 | | Week 5 ID50 ID80 | | Week 8 ID50 ID80 | |
|---|---|---|---|---|---|---|---|---|---|---|---|
| J1041-J1050 | SpFN_1B-06-PL and SpFN_SARS1 | 5 + 5 | BALB/c | ALFQ | Weeks 0, 3, 6 | 466 | 152 | 23865 | 10413 | 21766 | 8718 |
| J1051-J1060 | SpFN_1B-06-PL and SpFN_SARS1 | 1 + 1 | BALB/c | ALFQ | Weeks 0, 3, 6 | 611 | 118 | 28155 | 11826 | 25670 | 8989 |
| 301-310 | SpFN_1-06-PL and SpFN_SARS1 | 5 + 5 | C57BL/6 | ALFQ | Weeks 0, 3, 6 | 1208 | 365 | 17560 | 6658 | 10847 | 5097 |
| 311-320 | SpFN_1B-06-PL and SpFN_SARS1 | 1 + 1 | C57BL/6 | ALFQ | Weeks 0, 3, 6 | 1137 | 195 | 12974 | 4439 | 9651 | 4108 |

### Example 7 - Production of Spike-Ferritin Nanoparticles for HKU-1 and 229E Coronaviruses

[0352] In order to assess whether the design procedure for Spike-Ferritin constructs could be translated to other β-coronaviruses including HKU-1 and 229E coronaviruses, stabilized Spike-Ferritin immunogens were designed for HKU-1 (SEQ ID NOs: 268-275) and 229E (SEQ ID NOs: 264 and 265) based on the SARS-COV-2 SpFN_1B-06-PL format.

[0353] As shown in FIG. 46, stable Spike ferritin nanoparticles could be produced in mammalian cells, purified, and visualized by negative-stain EM. In both of these examples, the Spike-Ferritin nanoparticle shows the distinctive central ferritin region, with the protruding Spike. Three-dimensional reconstruction of the negative-stain images showed the closed pre-fusion Spikes on the surface of the Ferritin nanoparticle.

### Example 8 -Immunization of Mice With SARS-CoV-2 RBD DNA and Protein Immunogens Elicits Potent Neutralizing Antibody Responses

[0354] In order to assess whether using DNA encoding a SARS-CoV-2 RBD construct as a prime followed by a protein boost could elicit immune responses, a set of mice were immunized and the immune response was characterized as follows.

[0355] Methods: 96-well ELISA plates were coated with 1 µg/mL of RBD-His or a control His-tagged protein antigen in PBS, pH 7.4. Plates were incubated at 4° C. overnight and blocked with blocking buffer (Dulbecco’s PBS containing 0.5% milk and 0.1% Tween 20, pH 7.4, at room temperature (RT) for 2 h. Individual serum samples were serially diluted 2-fold in blocking buffer and added to triplicate wells and the plates were incubated at RT for 1 hour (h). Peroxidase-AffiniPure Goat Anti-Mouse IgG, Fcγ Fragment Specific was added and incubated at RT for an hour, followed by the addition of 2,2′-Azinobis [3-ethylbenzothiazoline-6-sulfonic acid]-diammonium salt (ABTS) HRP substrate (KPL) for 1 h at RT. The reaction was stopped by the addition of 1% SDS per well and the absorbance was measured at 450 nm. Results are shown in FIG. 48.

[0356] ACE2 inhibition assay: The biosensors were equilibrated in assay buffer for 30 s before being dipped in SARS-CoV-2 RBD-His (30 µg/ml diluted in PBS). The SARS-CoV-2 RBD-His were immobilized on HIS1K biosensors (FortéBio) for 180 s. After briefly dipping in assay buffer (30 s, PBS), binding of week 10 mouse serum was allowed to proceed for 180 s followed by a brief equilibration for 30 s. Binding of recombinant ACE2 protein (30 µg/ml) in solution was assessed for 120 s. Percent inhibition (PI) of RBD binding to ACE2 by mouse serum was determined by an equation: PI = 100 - [(ACE2 binding in the presence of competitor mouse serum) /(ACE2 binding in the absence of competitor mouse serum)] x 100. Results are show in FIG. 47.

[0357] Antigen Preparation: DNA encoding the SARS-Cov-2 RBD (residues 331-527) was synthesized (Genscript) with a C-terminal His6 purification tag and cloned into a CMVR plasmid, and protein was expressed by transient transfection in 293F cells for six days. The SARS-CoV-2 RBD (residues 331-527), with a C-terminal His-tag, was expressed in 293F cells. The RBD-Ferr construct was named pCoV03 (N-terminal His8 with HRV-3C cleavage site, GSGGGG linker between the RBD (residues 331-527 and Ferritin molecule). Proteins were purified from media supernatant by NiNTA affinity, and size-exclusion chromatography.

[0358] Animal Groups and Immunization/Assay Schedule: Four groups of female mice (C57BL/6 or BALB/c) aged 8 weeks old (n=5/group) were immunized using a DNA plasmid encoding a CMVR vector with the SARS-COV-2 RBD as the insert. Immunizations were carried out using a gene-gun, using 3 immunization sites with 1 ug of DNA per site, i.e. 3ug total DNA per immunization. These animals subsequently received two additional immunizations using GS-adjuvant (GenScript) with either RBD or RBD-Ferritin protein immunogens (Table 10). Intraperitoneal (IP) route was used for all mice immunizations. Sera samples were collected either 7 days or 14 days after each immunization for ELISA and other analyses.

TABLE 10

Immunization Regimen and Schedule

| Group | Animal Identifier | Strain | Immunization 1 | Immunization 2 | Immunization 3 | Immunization Schedule |
|---|---|---|---|---|---|---|
| 1 | 3083-3087 | BALB/c | SARS-CoV-2 RBD (3 µg CMVR DNA plasmid) | SARS-CoV-2 RBD (10 µg protein) | SARS-CoV-2 RBD (10 µg protein) | Weeks 0, 4, 7 |
| 2 | 3123-3127 | C57BL/6 | | | | |
| 3 | 3088-3092 | BALB/c | SARS-CoV-2 RBD (3 µg CMVR DNA plasmid) | SARS-CoV-2 RBD-Ferr (10 µg protein) | SARS-CoV-2 RBD-Ferr (10 µg protein) | Weeks 0, 4, 7 |
| 4 | 3128-3132 | C57BL/6 | | | | |

TABLE 11

Mice were sacrificed at 18 weeks and samples from groups 2,3 and 4 were analyzed for both SARS-CoV and SARS-CoV-2 pseudovirus neutralization titers

| Animal Identifiers | Immunogen | Mouse strain | SARS-CoV-1 | | SARS-CoV-2 | |
|---|---|---|---|---|---|---|
| | | | ID50 | ID80 | ID50 | ID80 |
| 3123-3127 | RBD (DNA prime) RBD (protein boost) | C57BL/6 | 183 | <40 | 2638 | 876 |
| 3088-3092 | RBD (DNA prime) RBD-Ferritin (protein boost) | BALB/c | 157 | <40 | 697 | 382 |
| 3128-3132 | RBD (DNA prime) RBD-Ferritin (protein boost) | C57BL/6 | 743 | 146 | 3503 | 1116 |

[0359] The use of a DNA prime followed by RBD or RBD-Ferritin protein boosts in the mouse model clearly showed robust induction of antibodies targeting the SARS-CoV-2 RBD, that are capable of blocking ACE2 binding and also provide robust and long lived neutralization activity against SARS-CoV-2 and SARS-CoV-1 up to 18 weeks after the first immunization, and more than 10 weeks after the final immunization (Table 11).

### Example 9 Dose Ranging Study Using Developmental Grade SpFN_1B-06-PL Material

[0360] Developmental grade material was produced in the WRAIR Pilot Bioproduction Facility according to cGMP procedures, and purified by anion exchange, filtered and stored at 4oC. This material was used to immunize BALB/c and C57BL/6 mice as shown in Table 12.

TABLE 12

Immunization Regimen and Schedule

| Group | Animal Identifier | Treatment | Volume Injected (µL) | Vaccine Dose (µg) | Adjuvant | Animals | Immunization Schedule |
|---|---|---|---|---|---|---|---|
| 1 | 1101-1110 | SpFN_1B-06-PL | 50 | 10 | ALFQ | 10 BALB/c | Weeks 0, 3, 6 |
| 2 | 1111-1120 | SpFN_1B-06-PL | 50 | 2 | ALFQ | 10 BALB/c | Weeks 0, 3, 6 |
| 3 | 1121-1130 | SpFN_1B-06-PL | 50 | 0.08 | ALFQ | 10 BALB/c | Weeks 0, 4, 8 |
| 4 | 1131-1140 | SpFN_1B-06-PL | 50 | 10 | ALFQ | 10 C57BL/6 | Weeks 0, 4, 8 |
| 5 | 1141-1150 | SpFN_1B-06-PL | 50 | 2 | ALFQ | 10 C57BL/6 | Weeks 0, 3, 6 |
| 6 | 1151-1160 | SpFN_1B-06-PL | 50 | 0.08 | ALFQ | 10 C57BL/6 | Weeks 0, 3, 6 |

[0361] Mice were bled to provide serum samples at regular intervals and samples were analyzed by ELISA for reactivity against SARS-CoV-2 S-2P and RBD as shown in Table 13.

TABLE 13

ELISA serum response against SARS-CoV-2 S-2P and RBD

| Group | Vaccine Dose (µg) | Week 2 | | Week 5 | | Week 8 | | Week 10 | | Week 12 | |
|---|---|---|---|---|---|---|---|---|---|---|---|
| | | S-2P RBD | | S-2P RBD | | S-2P RBD | | S-2P RBD | | S-2P | RBD |
| 1 | 10 | 30720 | 10880 | 368640 | 240640 | 327680 | 215040 | 471040 | 409600 | 204800 | 158720 |
| 2 | 2 | 17920 | 7680 | 389120 | 209920 | 256000 | 215040 | 634880 | 153600 | 199680 | 148480 |
| 3 | 0.08 | 7840 | 4160 | 271360 | 179200 | 324267 | 296960 | 450560 | 286720 | 675840 | 153600 |
| 4 | 10 | 174080 | 112640 | 942080 | 307200 | 573440 | 215040 | 573440 | 225280 | 471040 | 148480 |
| 5 | 2 | 143360 | 69120 | 491520 | 286720 | 389120 | 204800 | 696320 | 235520 | 368640 | 209920 |
| 6 | 0.08 | 40960 | 32000 | 225280 | 135680 | 450560 | 348160 | 655360 | 296960 | 455111 | 648533 |

[0362] Clear immune responses are seen against both the SARS-CoV-2 Spike and RBD after a single immunization and can be boosted by subsequent immunizations. The ELISA binding titers persist over the duration of the study with high levels of reactive antibodies observed 6 weeks after the last immunization.

### Example 10 Dose Ranging Study Using Research Grade SpFN_1B-06-PL Material

[0363] In order to understand the dose response of SpFN_1B-06-PL, a dose decrease study was carried out in two strains of mice, BALB/c and C57BL/6, with doses decreasing from 10 µg in 5-fold dilutions to a final tested concentration of 0.0032 µg (Table 14). Each dose was adjuvanted with ALFQ as previously described, and animals were immunized three times. Samples were taken at regular intervals to measure the immune response by ELISA against SARS-CoV-2 S-2P and RBD proteins.

TABLE 14

Immunization Regimen and Schedule

| Group | Animal Identifier | Treatment | Volume Injected (µL) | Vaccine Dose (µg) | Adjuvant | Animals | Immunization Schedule |
|---|---|---|---|---|---|---|---|
| 1 | 1761-1770 | SpFN_1B-06-PL | 50 | 10 | ALFQ | 10 C57BL/6 | Weeks 0, 3, 6 |
| 2 | 1771-1780 | SpFN_1B-06-PL | 50 | 2 | ALFQ | 10 C57BL/6 | Weeks 0, 3, 6 |
| 3 | 1781-1790 | SpFN_1B-06-PL | 50 | 0.4 | ALFQ | 10 C57BL/6 | Weeks 0, 4, 8 |
| 4 | 1791-1800 | SpFN_1B-06-PL | 50 | 0.08 | ALFQ | 10 C57BL/6 | Weeks 0, 4, 8 |
| 5 | 101-110 | SpFN_1B-06-PL | 50 | 0.016 | ALFQ | 10 C57BL/6 | Weeks 0, 3, 6 |
| 6 | 111-120 | SpFN_1B-06-PL | 50 | 0.0032 | ALFQ | 10 C57BL/6 | Weeks 0, 3, 6 |
| 7 | 1701-1710 | SpFN_1B-06-PL | 50 | 10 | ALFQ | 10 BALB/c | Weeks 0, 3, 6 |
| 8 | 1711-1720 | SpFN_1B-06-PL | 50 | 2 | ALFQ | 10 BALB/c | Weeks 0, 3, 6 |
| 9 | 1721-1730 | SpFN_1B-06-PL | 50 | 0.4 | ALFQ | 10 BALB/c | Weeks 0, 3, 6 |
| 10 | 1731-1740 | SpFN_1B-06-PL | 50 | 0.08 | ALFQ | 10 BALB/c | Weeks 0, 3, 6 |
| 11 | 1741-1750 | SpFN_1B-06-PL | 50 | 0.016 | ALFQ | 10 BALB/c | Weeks 0, 3, 6 |
| 12 | 1751-1760 | SpFN_1B-06-PL | 50 | 0.0032 | ALFQ | 10 BALB/c | Weeks 0, 3, 6 |

[0364] Even at the lowest dose (0.0032 µg), which is a 3125-fold dilution from the typical 10 ug dose, clear binding antibodies were observed to both the SARS-CoV-2 S-2P and RBD, that were ~ 3-4 fold lower in titer value compared to the 10 ug dose at the week 12 time point for the BALB/c mice (Table 15). In the three-immunization schedule, the lower doses responded to a greater magnitude with the third immunization, which partially explains the comparable final immune responses despite large differences in the immunogen amount.

TABLE 15

ELISA serum response against SARS-CoV-2 S-2P and RBD

| Group | Vaccine Dose(□g) | Week 2 | | Week 5 | | Week 8 | | Week 10 | | Week 12 | |
|---|---|---|---|---|---|---|---|---|---|---|---|
| | | S-2P | RBD | S-2P | RBD | S-2P | RBD | S-2P | RBD | S-2P | RBD |
| 1 | 10 | 204800 | 112640 | 327680 | 256000 | 471040 | 276480 | 552960 | 235520 | 471040 | 163840 |
| 2 | 2 | 163840 | 102400 | 348160 | 266240 | 655360 | 389120 | 532480 | 307200 | 450560 | 307200 |
| 3 | 0.4 | 92160 | 87040 | 261120 | 179200 | 552960 | 317440 | 655360 | 368640 | 471040 | 337920 |
| 4 | 0.08 | 48640 | 43520 | 261120 | 199680 | 614400 | 552960 | 839680 | 1413120 | 614400 | 471040 |
| 5 | 0.016 | 9980 | 5260 | 50880 | 32480 | 320000 | 206080 | 601600 | 313600 | 256000 | 190720 |
| 6 | 0.0032 | 260 | 220 | 2200 | 1580 | 7720 | 10520 | 23400 | 12040 | 11360 | 17480 |
| 7 | 10 | 87040 | 37120 | 512000 | 225280 | 593920 | 307200 | 737280 | 235520 | 235520 | 168960 |
| 8 | 2 | 51200 | 24320 | 696320 | 307200 | 860160 | 675840 | 1228800 | 327680 | 389120 | 337920 |
| 9 | 0.4 | 24320 | 4320 | 1310720 | 430080 | 1085440 | 209920 | 655360 | 215040 | 245760 | 133120 |
| 10 | 0.08 | 16000 | 4040 | 1024000 | 501760 | 901120 | 266240 | 573440 | 296960 | 327680 | 107520 |
| 11 | 0.016 | 5440 | 2800 | 343040 | 171520 | 389120 | 143360 | 440320 | 399360 | 204800 | 84480 |
| 12 | 0.0032 | 2400 | 2080 | 76200 | 54880 | 235520 | 61440 | 187733 | 170666 | 84480 | 56320 |

### Example 11 Analysis of Mouse Sera for Pseudovirus Neutralization Against SARS-CoV-1

[0365] In order to understand whether mouse sera immunized with SARS-CoV-2 immunogens could elicit antibody responses with broad reactivity against other related but distant SARS-like viruses, the serum from mice immunized with multiple Spike-nanoparticle immunogens was assessed for their ability to neutralize SARS-CoV-1 pseudoviruses.

[0366] Shown in Table 16 below are the ID50 and ID80 GMT titers for mice immunized with multiple types of immunogen and with either ALFQ or Alhydrogel as the adjuvant. High SARS-CoV-1 neutralizing antibody titers are routinely observed after three immunizations with the SARS-CoV-2 immunogens with the ALFQ adjuvant.

TABLE 16

SARS-CoV-1 pseudovirus neutralization GMT - mouse samples analyzed

| Animal Identifiers | Immunogen | Vaccine Dose(µg) | Mouse strain | Adjuvant | Immunization Schedule | Week 2 | | Week 5 | | Week 8 | |
|---|---|---|---|---|---|---|---|---|---|---|---|
| | | | | | | ID50 | ID80 | ID50 | ID80 | ID50 | ID80 |
| E771-E780 | SpFN_lB-06-PL | 2 | C57BL/6 | ALFQ | Weeks 0, 3, 6 | 106 | <40 | 1083 | 482 | 1384 | 465 |
| E861-E870 | SpFN_lB-06-PL | 2 | BALB/c | ALFQ | Weeks 0, 3, 6 | 59 | <40 | 460 | 160 | 803 | 256 |
| J1001-J1010 | SpFN_1B-06-PL + RBD-Ferr_131 Boost | 10 | BALB/c | ALFQ | Weeks 0, 3, 6 | 67 | <40 | 153 | 90 | 316 | 153 |
| J1061-J1070 | SpFN_1B-06-PL + RBD-Ferr_131 Boost | 10 | C57BL/6 | ALFQ | Weeks 0, 3, 6 | 64 | <40 | 181 | 84 | 371 | 118 |
| Z891-Z900 | pCoV187 (1B-08-PL with D614G) | 10 | BALB/c | ALFQ | Weeks 0, 3, 6 | NT | NT | 108 | <40 | 200 | 88 |
| Z761-Z770 | pCoV187 (1B-08-PL with D614G) | 10 | C57BL/6 | ALFQ | Weeks 0, 3, 6 | NT | NT | 276 | 107 | 517 | 149 |
| 581-590 | RBD-Ferr_pCoV131 | 10 | C57BL/6 | ALFQ | Weeks 0, 3, 6 | 303 | <80 | 1141 | 301 | 3053 | 857 |
| 1331-1340 | RBD-Ferr_pCoV131 | 10 | BALB/c | ALFQ | Weeks 0, 3, 6 | 596 | 102 | 889 | 219 | 2541 | 589 |
| 1341-1350 | RBD-Ferr_pCoV131 | 10 | BALB/c | Alhydrogel | Weeks 0, 3, 6 | 120 | >40 | 182 | 103 | 240 | 100 |
| 1391-1400 | pCoV146 | 10 | BALB/c | ALFQ | Weeks 0, 3, 6 | NT | NT | 201 | 57 | 246 | 87 |
| C831-C840 | pCoV146 | 10 | BALB/c | Alhydrogel | Weeks 0, 3, 6 | NT | NT | 153 | >40 | 177 | 47 |
| 901-910 | pCoV146 | 10 | C57BL/6 | ALFQ | Weeks 0, 3, 6 | NT | NT | 220 | 65 | 320 | 90 |
| C731-C740 | pCoV146 | 10 | C57BL/6 | Alhydrogel | Weeks 0, 3, 6 | NT | NT | NT | NT | 67 | <40 |

NT: not tested

### Example 12 Priming With Spike-Ferritin and Boosting With RBD-Ferritin_pCoV131

[0367] In order to assess whether an increased immune response could be generated by “Immune-focusing” responses to the RBD, a heterologous prime-boost study was carried out. Mice were primed with either SpFN_1B-06-PL or SpFN_pCoV187, followed by two subsequent immunizations with RBD-Ferritin_pCoV131 (FIG. 49). Sera were assessed for immune responses.

[0368] Shown in Table 17 below are the ID50 and ID80 GMT titers for mice immunized with pCoV187 followed by boost with pCoV131.

TABLE 17

SARS-CoV-2 Pseudovirus neutralization

| Animal Identifier | Treatment | Vaccine Dose (µg) | Mouse strain | Adjuvant | Immunization Schedule | Week 2 | | Week 5 | |
|---|---|---|---|---|---|---|---|---|---|
| | | | | | | ID50 | ID80 | ID50 | ID80 |
| C841-C850 | pCoV187 + RBD-Ferr_131 Boost | 10 | BALB/c | ALFQ | Weeks 0, 3, 6 | 849 | 231 | 5567 | 1569 |
| C741-C750 | pCoV187 + RBD-Ferr_131 Boost | 10 | C57BL/6 | ALFQ | Weeks 0, 3, 6 | 11489 | 4002 | 23076 | 8064 |

TABLE 18

Amino Acid Sequences for Exemplary Nanoparticle-Forming Proteins

| Table 18 Notes | ID | Construct | # of Residues | Amino Acid Sequence | SEQ ID NO |
|---|---|---|---|---|---|
| | pCoV01 | RBD-Ferritin | 378 | NITNLCPFGEVFNATRFASVYAWNRKRISNCVADYSVLYNSASFSTFKCY GVSPTKLNDLCFTNVYADSFVIRGDEVRQIAPGQTGKIADYNYKLPDDFT GCVIAWNSNNLDSKVGGNYNYLYRLFRKSNLKPFERDISTEIYQAGSTPC NGVEGFNCYFPLQSYGFQPTNGVGYQPYRVVVLSFELLHAPATVCGPGSG GGGESQVRQQFSKDIEKLLNEQVNKEMQSSNLYMSMSSWCYTHSLDGAGL FLFDHAAEEYEHAKKLIIFLNENNVPVQLTSISAPEHKFEGLTQIFQKAY EHEQHISESINNIVDHAIKSKDHATFNFLQWYVAEQHEEEVLFKDILDKI ELIGNENHGLYLADQYVKGIAKSRKSGS | 23 |
| | pCoV02 | S1-Ferritin | 844 | VNLTTRTQLPPAYTNSFTRGVYYPDKVFRSSVLHSTQDLFLPFFSNVTWF HAIHVSGTNGTKRFDNPVLPFNDGVYFASTEKSNIIRGWIFGTTLDSKTQ SLLIVNNATNVVIKVCEFQFCNDPFLGVYYHKNNKSWMESEFRVYSSANN CTFEYVSQPFLMDLEGKQGNFKNLREFVFKNIDGYFKIYSKHTPINLVRD LPQGFSALEPLVDLPIGINITRFQTLLALHRSYLTPGDSSSGWTAGAAAY YVGYLQPRTFLLKYNENGTITDAVDCALDPLSETKCTLKSFTVEKGIYQT SNFRVQPTESIVRFPNITNLCPFGEVFNATRFASVYAWNRKRISNCVADY SVLYNSASFSTFKCYGVSPTKLNDLCFTNVYADSFVIRGDEVRQIAPGQT GKIADYNYKLPDDFTGCVIAWNSNNLDSKVGGNYNYLYRLFRKSNLKPFE RDISTEIYQAGSTPCNGVEGFNCYFPLQSYGFQPTNGVGYQPYRVVVLSF ELLHAPATVCGPKKSTNLVKNKCVNFNFNGLTGTGVLTESNKKFLPFQQF GRDIADTTDAVRDPQTLEILDITPCSFGGVSVITPGTNTSNQVAVLYQDV NCTEVPVAIHADQLTPTWRVYSTGSNVFQTRAGCLIGAEHVNNSYECDIP IGAGICASYQTQTGSGGGGESQVRQQFSKDIEKLLNEQVNKEMQSSNLYM SMSSWCYTHSLDGAGLFLFDHAAEEYEHAKKLIIFLNENNVPVQLTSISA PEHKFEGLTQIFQKAYEHEQHISESINNIVDHAIKSKDHATFNFLQWYVA EQHEEEVLFKDILDKIELIGNENHGLYLADQYVKGIAKSRKSGS | 24 |
| | pCoV03 | His8-3c-RBD-Ferritin | 396 | HHHHHHHHGPLEVLFQGPNITNLCPFGEVFNATRFASVYAWNRKRISNCV ADYSVLYNSASFSTFKCYGVSPTKLNDLCFTNVYADSFVIRGDEVRQIAP GQTGKIADYNYKLPDDFTGCVIAWNSNNLDSKVGGNYNYLYRLFRKSNLK PFERDISTEIYQAGSTPCNGVEGFNCYFPLQSYGFQPTNGVGYQPYRVVV LSFELLHAPATVCGPGSGGGGESQVRQQFSKDIEKLLNEQVNKEMQSSNL YMSMSSWCYTHSLDGAGLFLFDHAAEEYEHAKKLIIFLNENNVPVQLTSI SAPEHKFEGLTQIFQKAYEHEQHISESINNIVDHAIKSKDHATFNFLQWY VAEQHEEEVLFKDILDKIELIGNENHGLYLADQYVKGIAKSRKSGS | 25 |
| | pCoV04 | His8-3c-S1-Ferritin | 862 | HHHHHHHHGPLEVLFQGPVNLTTRTQLPPAYTNSFTRGVYYPDKVFRSSV LHSTQDLFLPFFSNVTWFHAIHVSGTNGTKRFDNPVLPFNDGVYFASTEK SNIIRGWIFGTTLDSKTQSLLIVNNATNVVIKVCEFQFCNDPFLGVYYHK NNKSWMESEFRVYSSANNCTFEYVSQPFLMDLEGKQGNFKNLREFVFKNI DGYFKIYSKHTPINLVRDLPQGFSALEPLVDLPIGINITRFQTLLALHRS YLTPGDSSSGWTAGAAAYYVGYLQPRTFLLKYNENGTITDAVDCALDPLS ETKCTLKSFTVEKGIYQTSNFRVQPTESIVRFPNITNLCPFGEVFNATRF ASVYAWNRKRISNCVADYSVLYNSASFSTFKCYGVSPTKLNDLCFTNVYA DSFVIRGDEVRQIAPGQTGKIADYNYKLPDDFTGCVIAWNSNNLDSKVGG NYNYLYRLFRKSNLKPFERDISTEIYQAGSTPCNGVEGFNCYFPLQSYGF QPTNGVGYQPYRVVVLSFELLHAPATVCGPKKSTNLVKNKCVNFNFNGLT GTGVLTESNKKFLPFQQFGRDIADTTDAVRDPQTLEILDITPCSFGGVSV ITPGTNTSNQVAVLYQDVNCTEVPVAIHADQLTPTWRVYSTGSNVFQTRA GCLIGAEHVNNSYECDIPIGAGICASYQTQTGSGGGGESQVRQQFSKDIE KLLNEQVNKEMQSSNLYMSMSSWCYTHSLDGAGLFLFDHAAEEYEHAKKL IIFLNENNVPVQLTSISAPEHKFEGLTQIFQKAYEHEQHISESINNIVDH AIKSKDHATFNFLQWYVAEQHEEEVLFKDILDKIELIGNENHGLYLADQY VKGIAKSRKSGS | 26 |
| | pCoV12 | RBDDNIT-Ferritin | 375 | NLCPFGEVFNATRFASVYAWNRKRISNCVADYSVLYNSASFSTFKCYGVS PTKLNDLCFTNVYADSFVIRGDEVRQIAPGQTGKIADYNYKLPDDFTGCV IAWNSNNLDSKVGGNYNYLYRLFRKSNLKPFERDISTEIYQAGSTPCNGV EGFNCYFPLQSYGFQPTNGVGYQPYRVVVLSFELLHAPATVCGPGSGGGG ESQVRQQFSKDIEKLLNEQVNKEMQSSNLYMSMSSWCYTHSLDGAGLFLF DHAAEEYEHAKKLIIFLNENNVPVQLTSISAPEHKFEGLTQIFQKAYEHE QHISESINNIVDHAIKSKDHATFNFLQWYVAEQHEEEVLFKDILDKIELI GNENHGLYLADQYVKGIAKSRKSGS | 27 |
| | pCoV15 | RBD-Ferritin (short linker) | | HHHHHHHHGPLEVLFQGPNITNLCPFGEVFNATRFASVYAWNRKRISNCV ADYSVLYNSASFSTFKCYGVSPTKLNDLCFTNVYADSFVIRGDEVRQIAP GQTGKIADYNYKLPDDFTGCVIAWNSNNLDSKVGGNYNYLYRLFRKSNLK PFERDISTEIYQAGSTPCNGVEGFNCYFPLQSYGFQPTNGVGYQPYRVVV LSFELLHAPATVCGPGSGESQVRQQFSKDIEKLLNEQVNKEMQSSNLYMS MSSWCYTHSLDGAGLFLFDHAAEEYEHAKKLIIFLNENNVPVQLTSISAP EHKFEGLTQIFQKAYEHEQHISESINNIVDHAIKSKDHATFNFLQWYVAE QHEEEVLFKDILDKIELIGNENHGLYLADQYVKGIAKSRKSGS | 28 |
| | pCoV20 | His8-3c-RBDDNIT-Ferritin | | HHHHHHHHGPLEVLFQGPNLCPFGEVFNATRFASVYAWNRKRISNCVADY SVLYNSASFSTFKCYGVSPTKLNDLCFTNVYADSFVIRGDEVRQIAPGQT GKIADYNYKLPDDFTGCVIAWNSNNLDSKVGGNYNYLYRLFRKSNLKPFE RDISTEIYQAGSTPCNGVEGFNCYFPLQSYGFQPTNGVGYQPYRVVVLSF ELLHAPATVCGPGSGGGGESQVRQQFSKDIEKLLNEQVNKEMQSSNLYMS MSSWCYTHSLDGAGLFLFDHAAEEYEHAKKLIIFLNENNVPVQLTSISAP EHKFEGLTQIFQKAYEHEQHISESINNIVDHAIKSKDHATFNFLQWYVAE QHEEEVLFKDILDKIELIGNENHGLYLADQYVKGIAKSRKSGS | 29 |
| | pCoV21 | His8-3c-RBD-6-LS | 375 | HHHHHHHHGPLEVLFQGPNITNLCPFGEVFNATRFASVYAWNRKRISNCV ADYSVLYNSASFSTFKCYGVSPTKLNDLCFTNVYADSFVIRGDEVRQIAP GQTGKIADYNYKLPDDFTGCVIAWNSNNLDSKVGGNYNYLYRLFRKSNLK PFERDISTEIYQAGSTPCNGVEGFNCYFPLQSYGFQPTNGVGYQPYRVVV LSFELLHAPATVCGPGSGGGGMQIYEGKLTAEGLRFGIVASRFNHALVDR LVEGAIDAIVRHGGREEDITLVRVPGSWEIPVAAGELARKEDIDAVIAIG VLIRGATPHFDYIASEVSKGLADLSLELRKPITFGVITADTLEQAIERAG TKHGNKGWEAALSAIEMANLFKSLR | 30 |
| | pCoV22 | LS-15-RBD-3c-Strep-His8 | 414 | MQIYEGKLTAEGLRFGIVASRFNHALVDRLVEGAIDAIVRHGGREEDITL VRVPGSWEIPVAAGELARKEDIDAVIAIGVLIRGATPHFDYIASEVSKGL ADLSLELRKPITFGVITADTLEQAIERAGTKHGNKGWEAALSAIEMANLF KSLRGGSGGSGGSGGSGGGNITNLCPFGEVFNATRFASVYAWNRKRISNC VADYSVLYNSASFSTFKCYGVSPTKLNDLCFTNVYADSFVIRGDEVRQIA PGQTGKIADYNYKLPDDFTGCVIAWNSNNLDSKVGGNYNYLYRLFRKSNL KPFERDISTEIYQAGSTPCNGVEGFNCYFPLQSYGFQPTNGVGYQPYRVV VLSFELLHAPATVCGPLEVLFQGPSAWSHPQFEKGGGSGGGSGGSAWSHP QFEKGSHHHHHHHH | 31 |
| | pCoV23 | His8-3c-NTD-Ferritin | 487 | HHHHHHHHGPLEVLFQGPVNLTTRTQLPPAYTNSFTRGVYYPDKVFRSSV LHSTQDLFLPFFSNVTWFHAIHVSGTNGTKRFDNPVLPFNDGVYFASTEK SNIIRGWIFGTTLDSKTQSLLIVNNATNVVIKVCEFQFCNDPFLGVYYHK NNKSWMESEFRVYSSANNCTFEYVSQPFLMDLEGKQGNFKNLREFVFKNI DGYFKIYSKHTPINLVRDLPQGFSALEPLVDLPIGINITRFQTLLALHRS YLTPGDSSSGWTAGAAAYYVGYLQPRTFLLKYNENGTITDAVDCALDPLS ETKCTLGSGGGGESQVRQQFSKDIEKLLNEQVNKEMQSSNLYMSMSSWCY THSLDGAGLFLFDHAAEEYEHAKKLIIFLNENNVPVQLTSISAPEHKFEG LTQIFQKAYEHEQHISESINNIVDHAIKSKDHATFNFLQWYVAEQHEEEV LFKDILDKIELIGNENHGLYLADQYVKGIAKSRKSGS | 32 |
| | pCoV29 | His8c-3c-RBD-3-Ferritin | 393 | HHHHHHHHGPLEVLFQGPNITNLCPFGEVFNATRFASVYAWNRKRISNCV ADYSVLYNSASFSTFKCYGVSPTKLNDLCFTNVYADSFVIRGDEVRQIAP GQTGKIADYNYKLPDDFTGCVIAWNSNNLDSKVGGNYNYLYRLFRKSNLK PFERDISTEIYQAGSTPCNGVEGFNCYFPLQSYGFQPTNGVGYQPYRVVV LSFELLHAPATVCGGSGGESQVRQQFSKDIEKLLNEQVNKEMQSSNLYMS MSSWCYTHSLDGAGLFLFDHAAEEYEHAKKLIIFLNENNVPVQLTSISAP EHKFEGLTQIFQKAYEHEQHISESINNIVDHAIKSKDHATFNFLQWYVAE QHEEEVLFKDILDKIELIGNENHGLYLADQYVKGIAKSRKSGS | 33 |
| | pCoV30 | His8-3c-RBD-3-del-Ferritin | 383 | HHHHHHHHGPLEVLFQGPNITNLCPFGEVFNATRFASVYAWNRKRISNCV ADYSVLYNSASFSTFKCYGVSPTKLNDLCFTNVYADSFVIRGDEVRQIAP GQTGKIADYNYKLPDDFTGCVIAWNSNNLDSKVGGNYNYLYRLFRKSNLK PFERDISTEIYQAGSTPCNGVEGFNCYFPLQSYGFQPTNGVGYQPYRVVV LSFELLHAPATVCGGSGGDIIKLLNEQVNKEMQSSNLYMSMSSWCYTHSL DGAGLFLFDHAAEEYEHAKKLIIFLNENNVPVQLTSISAPEHKFEGLTQI FQKAYEHEQHISESINNIVDHAIKSKDHATFNFLQWYVAEQHEEEVLFKD ILDKIELIGNENHGLYLADQYVKGIAKSRKSGS | 34 |
| | pCoV31 | His8-3c-RBD-6-del-Ferritin | 388 | HHHHHHHHGPLEVLFQGPNITNLCPFGEVFNATRFASVYAWNRKRISNCV ADYSVLYNSASFSTFKCYGVSPTKLNDLCFTNVYADSFVIRGDEVRQIAP GQTGKIADYNYKLPDDFTGCVIAWNSNNLDSKVGGNYNYLYRLFRKSNLK PFERDISTEIYQAGSTPCNGVEGFNCYFPLQSYGFQPTNGVGYQPYRVVV LSFELLHAPATVCGGGSGGGGSKDIIKLLNEQVNKEMQSSNLYMSMSSWC YTHSLDGAGLFLFDHAAEEYEHAKKLIIFLNENNVPVQLTSISAPEHKFE GLTQIFQKAYEHEQHISESINNIVDHAIKSKDHATFNFLQWYVAEQHEEE VLFKDILDKIELIGNENHGLYLADQYVKGIAKSRKSGS | 35 |
| | pCoV32 | His8-3c-RBDSD1-Ferritin | 472 | HHHHHHHHGPLEVLFQGPRVQPTESIVRFPNITNLCPFGEVFNATRFASV YAWNRKRISNCVADYSVLYNSASFSTFKCYGVSPTKLNDLCFTNVYADSF VIRGDEVRQIAPGQTGKIADYNYKLPDDFTGCVIAWNSNNLDSKVGGNYN YLYRLFRKSNLKPFERDISTEIYQAGSTPCNGVEGFNCYFPLQSYGFQPT NGVGYQPYRVVVLSFELLHAPATVCGPKKSTNLVKNKCVNFNFNGLTGTG VLTESNKKFLPFQQFGRDIADTTDAVRDPQTLEILDITPCSGSGGGGESQ VRQQFSKDIEKLLNEQVNKEMQSSNLYMSMSSWCYTHSLDGAGLFLFDHA AEEYEHAKKLIIFLNENNVPVQLTSISAPEHKFEGLTQIFQKAYEHEQHI SESINNIVDHAIKSKDHATFNFLQWYVAEQHEEEVLFKDILDKIELIGNE NHGLYLADQYVKGIAKSRKSGS | 36 |
| | pCoV33 | Ferritin | 175 | ESQVRQQFSKDIEKLLNEQVNKEMQSSNLYMSMSSWCYTHSLDGAGLFLF DHAAEEYEHAKKLIIFLNENNVPVQLTSISAPEHKFEGLTQIFQKAYEHE QHISESINNIVDHAIKSKDHATFNFLQWYVAEQHEEEVLFKDILDKIELI GNENHGLYLADQYVKGIAKSRKSGS | 37 |
| | pCoV34 | His8-3c-NTD-6-LS | 466 | HHHHHHHHGPLEVLFQGPVNLTTRTQLPPAYTNSFTRGVYYPDKVFRSSV LHSTQDLFLPFFSNVTWFHAIHVSGTNGTKRFDNPVLPFNDGVYFASTEK SNIIRGWIFGTTLDSKTQSLLIVNNATNVVIKVCEFQFCNDPFLGVYYHK NNKSWMESEFRVYSSANNCTFEYVSQPFLMDLEGKQGNFKNLREFVFKNI DGYFKIYSKHTPINLVRDLPQGFSALEPLVDLPIGINITRFQTLLALHRS YLTPGDSSSGWTAGAAAYYVGYLQPRTFLLKYNENGTITDAVDCALDPLS ETKCTLGSGGGGMQIYEGKLTAEGLRFGIVASRFNHALVDRLVEGAIDAI VRHGGREEDITLVRVPGSWEIPVAAGELARKEDIDAVIAIGVLIRGATPH FDYIASEVSKGLADLSLELRKPITFGVITADTLEQAIERAGTKHGNKGWE AALSAIEMANLFKSLR | 38 |
| | pCoV35 | LS-15-NTD-3c-Strep-His8 | 475 | MQIYEGKLTAEGLRFGIVASRFNHALVDRLVEGAIDAIVRHGGREEDITL VRVPGSWEIPVAAGELARKEDIDAVIAIGVLIRGATPHFDYIASEVSKGL ADLSLELRKPITFGVITADTLEQAIERAGTKHGNKGWEAALSAIEMANLF KSLRGGSGGSGGSGGSGGGVNLTTRTQLPPAYTNSFTRGVYYPDKVFRSS VLHSTQDLFLPFFSNVTWFHAIHVSGTNGTKRFDNPVLPFNDGVYFASTE KSNIIRGWIFGTTLDSKTQSLLIVNNATNVVIKVCEFQFCNDPFLGVYYH KNNKSWMESEFRVYSSANNCTFEYVSQPFLMDLEGKQGNFKNLREFVFKN IDGYFKIYSKHTPINLVRDLPQGFSALEPLVDLPIGINITRFQTLLALHR SYLTPGDSSSGWTAGAAAYYVGYLQPRTFLLKYNENGTITDAVDCALDPL SETKCTLGSLEVLFQGPHHHHHHHH | 39 |
| | pCoV39 | RBD-3-Ferritin | 375 | NITNLCPFGEVFNATRFASVYAWNRKRISNCVADYSVLYNSASFSTFKCY GVSPTKLNDLCFTNVYADSFVIRGDEVRQIAPGQTGKIADYNYKLPDDFT GCVIAWNSNNLDSKVGGNYNYLYRLFRKSNLKPFERDISTEIYQAGSTPC NGVEGFNCYFPLQSYGFQPTNGVGYQPYRVVVLSFELLHAPATVCGGSGG ESQVRQQFSKDIEKLLNEQVNKEMQSSNLYMSMSSWCYTHSLDGAGLFLF DHAAEEYEHAKKLIIFLNENNVPVQLTSISAPEHKFEGLTQIFQKAYEHE QHISESINNIVDHAIKSKDHATFNFLQWYVAEQHEEEVLFKDILDKIELI GNENHGLYLADQYVKGIAKSRKSGS | 40 |
| | pCoV40 | RBD-3-delFerritin | 365 | NITNLCPFGEVFNATRFASVYAWNRKRISNCVADYSVLYNSASFSTFKCY GVSPTKLNDLCFTNVYADSFVIRGDEVRQIAPGQTGKIADYNYKLPDDFT GCVIAWNSNNLDSKVGGNYNYLYRLFRKSNLKPFERDISTEIYQAGSTPC NGVEGFNCYFPLQSYGFQPTNGVGYQPYRVVVLSFELLHAPATVCGGSGG DIIKLLNEQVNKEMQSSNLYMSMSSWCYTHSLDGAGLFLFDHAAEEYEHA KKLIIFLNENNVPVQLTSISAPEHKFEGLTQIFQKAYEHEQHISESINNI VDHAIKSKDHATFNFLQWYVAEQHEEEVLFKDILDKIELIGNENHGLYLA DQYVKGIAKSRKSGS | 41 |
| | pCoV46 | His8-3c-RBDSD1-6-del-Ferritin | 464 | HHHHHHHHGPLEVLFQGPRVQPTESIVRFPNITNLCPFGEVFNATRFASV YAWNRKRISNCVADYSVLYNSASFSTFKCYGVSPTKLNDLCFTNVYADSF VIRGDEVRQIAPGQTGKIADYNYKLPDDFTGCVIAWNSNNLDSKVGGNYN YLYRLFRKSNLKPFERDISTEIYQAGSTPCNGVEGFNCYFPLQSYGFQPT NGVGYQPYRVVVLSFELLHAPATVCGPKKSTNLVKNKCVNFNFNGLTGTG VLTESNKKFLPFQQFGRDIADTTDAVRDPQTLEILDITPCSGSGGGGSKD IIKLLNEQVNKEMQSSNLYMSMSSWCYTHSLDGAGLFLFDHAAEEYEHAK KLIIFLNENNVPVQLTSISAPEHKFEGLTQIFQKAYEHEQHISESINNIV DHAIKSKDHATFNFLQWYVAEQHEEEVLFKDILDKIELIGNENHGLYLAD QYVKGIAKSRKSGS | 42 |
| | pCov1A-01 | His8-3C-RBD-PPII-Ferritin | 409 | HHHHHHHHGPLEVLFQGPNITNLCPFGEVFNATRFASVYAWNRKRISNCV ADYSVLYNSASFSTFKCYGVSPTKLNDLCFTNVYADSFVIRGDEVRQIAP GQTGKIADYNYKLPDDFTGCVIAWNSNNLDSKVGGNYNYLYRLFRKSNLK PFERDISTEIYQAGSTPCNGVEGFNCYFPLQSYGFQPTNGVGYQPYRVVV LSFELLHAPATVCGGSGGPPPPPPPPPPGSGGGGESQVRQQFSKDIEKLL NEQVNKEMQSSNLYMSMSSWCYTHSLDGAGLFLFDHAAEEYEHAKKLIIF LNENNVPVQLTSISAPEHKFEGLTQIFQKAYEHEQHISESINNIVDHAIK SKDHATFNFLQWYVAEQHEEEVLFKDILDKIELIGNENHGLYLADQYVKG IAKSRKSGS | 43 |
| | pCoV1A-02 | His8-3C-RBD-alpha1-Ferritin | 410 | HHHHHHHHGPLEVLFQGPNITNLCPFGEVFNATRFASVYAWNRKRISNCV ADYSVLYNSASFSTFKCYGVSPTKLNDLCFTNVYADSFVIRGDEVRQIAP GQTGKIADYNYKLPDDFTGCVIAWNSNNLDSKVGGNYNYLYRLFRKSNLK PFERDISTEIYQAGSTPCNGVEGFNCYFPLQSYGFQPTNGVGYQPYRVVV LSFELLHAPATVCGGSGGEKDSHKEEKDSHKGSGGESQVRQQFSKDIEKL LNEQVNKEMQSSNLYMSMSSWCYTHSLDGAGLFLFDHAAEEYEHAKKLII FLNENNVPVQLTSISAPEHKFEGLTQIFQKAYEHEQHISESINNIVDHAI KSKDHATFNFLQWYVAEQHEEEVLFKDILDKIELIGNENHGLYLADQYVK GIAKSRKSGS | 44 |
| | pCoV1A-03 | His8-3C-RBD-alpha2-Ferritin | 412 | HHHHHHHHGPLEVLFQGPNITNLCPFGEVFNATRFASVYAWNRKRISNCV ADYSVLYNSASFSTFKCYGVSPTKLNDLCFTNVYADSFVIRGDEVRQIAP GQTGKIADYNYKLPDDFTGCVIAWNSNNLDSKVGGNYNYLYRLFRKSNLK PFERDISTEIYQAGSTPCNGVEGFNCYFPLQSYGFQPTNGVGYQPYRVVV LSFELLHAPATVCGGSGGEDNAQHTSADNEATKGSGGESQVRQQFSKDIE KLLNEQVNKEMQSSNLYMSMSSWCYTHSLDGAGLFLFDHAAEEYEHAKKL IIFLNENNVPVQLTSISAPEHKFEGLTQIFQKAYEHEQHISESINNIVDH AIKSKDHATFNFLQWYVAEQHEEEVLFKDILDKIELIGNENHGLYLADQY VKGIAKSRKSGS | 45 |
| | pCoV1A-04 | His8-3C-RBD-GCN4-del-Ferritin | 423 | HHHHHHHHGPLEVLFQGPNITNLCPFGEVFNATRFASVYAWNRKRISNCV ADYSVLYNSASFSTFKCYGVSPTKLNDLCFTNVYADSFVIRGDEVRQIAP GQTGKIADYNYKLPDDFTGCVIAWNSNNLDSKVGGNYNYLYRLFRKSNLK PFERDISTEIYQAGSTPCNGVEGFNCYFPLQSYGFQPTNGVGYQPYRVVV LSFELLHAPATVCGGSGSGGEMKQIEDKIEEILSKIYHIENEIARIKKLI GRGSGGSGDIIKLLNEQVNKEMQSSNLYMSMSSWCYTHSLDGAGLFLFDH AAEEYEHAKKLIIFLNENNVPVQLTSISAPEHKFEGLTQIFQKAYEHEQH ISESINNIVDHAIKSKDHATFNFLQWYVAEQHEEEVLFKDILDKIELIGN ENHGLYLADQYVKGIAKSRKSGS | 46 |
| | pCoV1A-05 | His8-3C-RBD-1141_1158opl -del-Ferritin | 406 | HHHHHHHHGPLEVLFQGPNITNLCPFGEVFNATRFASVYAWNRKRISNCV ADYSVLYNSASFSTFKCYGVSPTKLNDLCFTNVYADSFVIRGDEVRQIAP GQTGKIADYNYKLPDDFTGCVIAWNSNNLDSKVGGNYNYLYRLFRKSNLK PFERDISTEIYQAGSTPCNGVEGFNCYFPLQSYGFQPTNGVGYQPYRVVV LSFELLHAPATVCGGSGSGGELQSELDSIKEELDKGSGGSGDIIKLLNEQ VNKEMQSSNLYMSMSSWCYTHSLDGAGLFLFDHAAEEYEHAKKLIIFLNE NNVPVQLTSISAPEHKFEGLTQIFQKAYEHEQHISESINNIVDHAIKSKD HATFNFLQWYVAEQHEEEVLFKDILDKIELIGNENHGLYLADQYVKGIAK SRKSGS | 47 |
| | pCoV1A-06 | His8-3C-RBD-1141_1158opl x2-del-Ferritin | 424 | HHHHHHHHGPLEVLFQGPNITNLCPFGEVFNATRFASVYAWNRKRISNCV ADYSVLYNSASFSTFKCYGVSPTKLNDLCFTNVYADSFVIRGDEVRQIAP GQTGKIADYNYKLPDDFTGCVIAWNSNNLDSKVGGNYNYLYRLFRKSNLK PFERDISTEIYQAGSTPCNGVEGFNCYFPLQSYGFQPTNGVGYQPYRVVV LSFELLHAPATVCGGSGSGGELQSELDSIKEELDKIHKNLDSIKEELDKI HKNGSGGSGDIIKLLNEQVNKEMQSSNLYMSMSSWCYTHSLDGAGLFLFD HAAEEYEHAKKLIIFLNENNVPVQLTSISAPEHKFEGLTQIFQKAYEHEQ HISESINNIVDHAIKSKDHATFNFLQWYVAEQHEEEVLFKDILDKIELIG NENHGLYLADQYVKGIAKSRKSGS | 48 |
| | pCoV49 | His8-3c-RBD-Ferritin-F456N/K458T | 396 | HHHHHHHHGPLEVLFQGPNITNLCPFGEVFNATRFASVYAWNRKRISNCV ADYSVLYNSASFSTFKCYGVSPTKLNDLCFTNVYADSFVIRGDEVRQIAP GQTGKIADYNYKLPDDFTGCVIAWNSNNLDSKVGGNYNYLYRLNRTSNLK PFERDISTEIYQAGSTPCNGVEGFNCYFPLQSYGFQPTNGVGYQPYRVVV LSFELLHAPATVCGPGSGGGGESQVRQQFSKDIEKLLNEQVNKEMQSSNL YMSMSSWCYTHSLDGAGLFLFDHAAEEYEHAKKLIIFLNENNVPVQLTSI SAPEHKFEGLTQIFQKAYEHEQHISESINNIVDHAIKSKDHATFNFLQWY VAEQHEEEVLFKDILDKIELIGNENHGLYLADQYVKGIAKSRKSGS | 49 |
| | pCoV50 | His8-3c-RBD-Ferritin-L455R/Y449K /F490R | 396 | HHHHHHHHGPLEVLFQGPNITNLCPFGEVFNATRFASVYAWNRKRISNCV ADYSVLYNSASFSTFKCYGVSPTKLNDLCFTNVYADSFVIRGDEVRQIAP GQTGKIADYNYKLPDDFTGCVIAWNSNNLDSKVGGNKNYLYRRFRKSNLK PFERDISTEIYQAGSTPCNGVEGFNCYRPLQSYGFQPTNGVGYQPYRVVV LSFELLHAPATVCGPGSGGGGESQVRQQFSKDIEKLLNEQVNKEMQSSNL YMSMSSWCYTHSLDGAGLFLFDHAAEEYEHAKKLIIFLNENNVPVQLTSI SAPEHKFEGLTQIFQKAYEHEQHISESINNIVDHAIKSKDHATFNFLQWY V AEQHEEEVLFKDILDKIELIGNENHGLYLADQYVKGIAKSRKSGS | 50 |
| | pCoV51 | His8-3c-RBD-Ferritin-L455R | 396 | HHHHHHHHGPLEVLFQGPNITNLCPFGEVFNATRFASVYAWNRKRISNCV ADYSVLYNSASFSTFKCYGVSPTKLNDLCFTNVYADSFVIRGDEVRQIAP GQTGKIADYNYKLPDDFTGCVIAWNSNNLDSKVGGNYNYLYRRFRKSNLK PFERDISTEIYQAGSTPCNGVEGFNCYFPLQSYGFQPTNGVGYQPYRVVV LSFELLHAPATVCGPGSGGGGESQVRQQFSKDIEKLLNEQVNKEMQSSNL YMSMSSWCYTHSLDGAGLFLFDHAAEEYEHAKKLIIFLNENNVPVQLTSI SAPEHKFEGLTQIFQKAYEHEQHISESINNIVDHAIKSKDHATFNFLQWY V AEQHEEEVLFKDILDKIELIGNENHGLYLADQYVKGIAKSRKSGS | 51 |
| | pCoV52 | His8-3c-RBD-Ferritin-I468R | 396 | HHHHHHHHGPLEVLFQGPNITNLCPFGEVFNATRFASVYAWNRKRISNCV ADYSVLYNSASFSTFKCYGVSPTKLNDLCFTNVYADSFVIRGDEVRQIAP GQTGKIADYNYKLPDDFTGCVIAWNSNNLDSKVGGNYNYLYRLFRKSNLK PFERDRSTEIYQAGSTPCNGVEGFNCYFPLQSYGFQPTNGVGYQPYRVVV LSFELLHAPATVCGPGSGGGGESQVRQQFSKDIEKLLNEQVNKEMQSSNL YMSMSSWCYTHSLDGAGLFLFDHAAEEYEHAKKLIIFLNENNVPVQLTSI SAPEHKFEGLTQIFQKAYEHEQHISESINNIVDHAIKSKDHATFNFLQWY V AEQHEEEVLFKDILDKIELIGNENHGLYLADQYVKGIAKSRKSGS | 52 |
| | pCoV53 | His8-3c-RBD-Ferritin-Y453R | 396 | HHHHHHHHGPLEVLFQGPNITNLCPFGEVFNATRFASVYAWNRKRISNCV ADYSVLYNSASFSTFKCYGVSPTKLNDLCFTNVYADSFVIRGDEVRQIAP GQTGKIADYNYKLPDDFTGCVIAWNSNNLDSKVGGNYNYLRRLFRKSNLK PFERDISTEIYQAGSTPCNGVEGFNCYFPLQSYGFQPTNGVGYQPYRVVV LSFELLHAPATVCGPGSGGGGESQVRQQFSKDIEKLLNEQVNKEMQSSNL YMSMSSWCYTHSLDGAGLFLFDHAAEEYEHAKKLIIFLNENNVPVQLTSI SAPEHKFEGLTQIFQKAYEHEQHISESINNIVDHAIKSKDHATFNFLQWY V AEQHEEEVLFKDILDKIELIGNENHGLYLADQYVKGIAKSRKSGS | 53 |
| | pCoV54 | His8-3c-RBD-Ferritin-L452R | 396 | HHHHHHHHGPLEVLFQGPNITNLCPFGEVFNATRFASVYAWNRKRISNCV ADYSVLYNSASFSTFKCYGVSPTKLNDLCFTNVYADSFVIRGDEVRQIAP GQTGKIADYNYKLPDDFTGCVIAWNSNNLDSKVGGNYNYRYRLFRKSNLK PFERDISTEIYQAGSTPCNGVEGFNCYFPLQSYGFQPTNGVGYQPYRVVV LSFELLHAPATVCGPGSGGGGESQVRQQFSKDIEKLLNEQVNKEMQSSNL YMSMSSWCYTHSLDGAGLFLFDHAAEEYEHAKKLIIFLNENNVPVQLTSI SAPEHKFEGLTQIFQKAYEHEQHISESINNIVDHAIKSKDHATFNFLQWY V AEQHEEEVLFKDILDKIELIGNENHGLYLADQYVKGIAKSRKSGS | 54 |
| | pCoV55 | His8-3c-RBD-Ferritin-L492R | 396 | HHHHHHHHGPLEVLFQGPNITNLCPFGEVFNATRFASVYAWNRKRISNCV ADYSVLYNSASFSTFKCYGVSPTKLNDLCFTNVYADSFVIRGDEVRQIAP GQTGKIADYNYKLPDDFTGCVIAWNSNNLDSKVGGNYNYLYRLFRKSNLK PFERDISTEIYQAGSTPCNGVEGFNCYFPRQSYGFQPTNGVGYQPYRVVV LSFELLHAPATVCGPGSGGGGESQVRQQFSKDIEKLLNEQVNKEMQSSNL YMSMSSWCYTHSLDGAGLFLFDHAAEEYEHAKKLIIFLNENNVPVQLTSI SAPEHKFEGLTQIFQKAYEHEQHISESINNIVDHAIKSKDHATFNFLQWY VAEQHEEEVLFKDILDKIELIGNENHGLYLADQYVKGIAKSRKSGS | 55 |
| | pCoV56 | His8-3c-RBD-Ferritin-F490R | 396 | HHHHHHHHGPLEVLFQGPNITNLCPFGEVFNATRFASVYAWNRKRISNCV ADYSVLYNSASFSTFKCYGVSPTKLNDLCFTNVYADSFVIRGDEVRQIAP GQTGKIADYNYKLPDDFTGCVIAWNSNNLDSKVGGNYNYLYRLFRKSNLK PFERDISTEIYQAGSTPCNGVEGFNCYRPLQSYGFQPTNGVGYQPYRVVV LSFELLHAPATVCGPGSGGGGESQVRQQFSKDIEKLLNEQVNKEMQSSNL YMSMSSWCYTHSLDGAGLFLFDHAAEEYEHAKKLIIFLNENNVPVQLTSI SAPEHKFEGLTQIFQKAYEHEQHISESINNIVDHAIKSKDHATFNFLQWY V AEQHEEEVLFKDILDKIELIGNENHGLYLADQYVKGIAKSRKSGS | 56 |
| | pCoV57 | His8-3c-RBD-Ferritin-F490A | 396 | HHHHHHHHGPLEVLFQGPNITNLCPFGEVFNATRFASVYAWNRKRISNCV ADYSVLYNSASFSTFKCYGVSPTKLNDLCFTNVYADSFVIRGDEVRQIAP GQTGKIADYNYKLPDDFTGCVIAWNSNNLDSKVGGNYNYLYRLFRKSNLK PFERDISTEIYQAGSTPCNGVEGFNCYAPLQSYGFQPTNGVGYQPYRVVV LSFELLHAPATVCGPGSGGGGESQVRQQFSKDIEKLLNEQVNKEMQSSNL YMSMSSWCYTHSLDGAGLFLFDHAAEEYEHAKKLIIFLNENNVPVQLTSI SAPEHKFEGLTQIFQKAYEHEQHISESINNIVDHAIKSKDHATFNFLQWY V AEQHEEEVLFKDILDKIELIGNENHGLYLADQYVKGIAKSRKSGS | 57 |
| | pCoV58 | His8-3c-RBD-Ferritin-518LLH to 518 NKS | 396 | HHHHHHHHGPLEVLFQGPNITNLCPFGEVFNATRFASVYAWNRKRISNCV ADYSVLYNSASFSTFKCYGVSPTKLNDLCFTNVYADSFVIRGDEVRQIAP GQTGKIADYNYKLPDDFTGCVIAWNSNNLDSKVGGNYNYLYRLFRKSNLK PFERDISTEIYQAGSTPCNGVEGFNCYFPLQSYGFQPTNGVGYQPYRVVV LSFENKSAPATVCGPGSGGGGESQVRQQFSKDIEKLLNEQVNKEMQSSNL YMSMSSWCYTHSLDGAGLFLFDHAAEEYEHAKKLIIFLNENNVPVQLTSI SAPEHKFEGLTQIFQKAYEHEQHISESINNIVDHAIKSKDHATFNFLQWY VAEQHEEEVLFKDILDKIELIGNENHGLYLADQYVKGIAKSRKSGS | 58 |
| | pCoV59 | His8-3c-RBD-Ferritin-L518R | 396 | HHHHHHHHGPLEVLFQGPNITNLCPFGEVFNATRFASVYAWNRKRISNCV ADYSVLYNSASFSTFKCYGVSPTKLNDLCFTNVYADSFVIRGDEVRQIAP GQTGKIADYNYKLPDDFTGCVIAWNSNNLDSKVGGNYNYLYRLFRKSNLK PFERDISTEIYQAGSTPCNGVEGFNCYFPLQSYGFQPTNGVGYQPYRVVV LSFELRHAPATVCGPGSGGGGESQVRQQFSKDIEKLLNEQVNKEMQSSNL YMSMSSWCYTHSLDGAGLFLFDHAAEEYEHAKKLIIFLNENNVPVQLTSI SAPEHKFEGLTQIFQKAYEHEQHISESINNIVDHAIKSKDHATFNFLQWY VAEQHEEEVLFKDILDKIELIGNENHGLYLADQYVKGIAKSRKSGS | 59 |
| | pCoV60 | His8-3c-RBD-Ferritin-V367T/L335N | 396 | HHHHHHHHGPLEVLFQGPNITNNCPFGEVFNATRFASVYAWNRKRISNCV ADYSTLYNSASFSTFKCYGVSPTKLNDLCFTNVYADSFVIRGDEVRQIAP GQTGKIADYNYKLPDDFTGCVIAWNSNNLDSKVGGNYNYLYRLFRKSNLK PFERDISTEIYQAGSTPCNGVEGFNCYFPLQSYGFQPTNGVGYQPYRVVV LSFELLHAPATVCGPGSGGGGESQVRQQFSKDIEKLLNEQVNKEMQSSNL YMSMSSWCYTHSLDGAGLFLFDHAAEEYEHAKKLIIFLNENNVPVQLTSI SAPEHKFEGLTQIFQKAYEHEQHISESINNIVDHAIKSKDHATFNFLQWY VAEQHEEEVLFKDILDKIELIGNENHGLYLADQYVKGIAKSRKSGS | 60 |
| | pCoV61 | His8-3c-RBD-Ferritin-T385N/L387T | 396 | HHHHHHHHGPLEVLFQGPNITNLCPFGEVFNATRFASVYAWNRKRISNCV ADYSVLYNSASFSTFKCYGVSPNKTNDLCFTNVYADSFVIRGDEVRQIAP GQTGKIADYNYKLPDDFTGCVIAWNSNNLDSKVGGNYNYLYRLFRKSNLK PFERDISTEIYQAGSTPCNGVEGFNCYFPLQSYGFQPTNGVGYQPYRVVV LSFELLHAPATVCGPGSGGGGESQVRQQFSKDIEKLLNEQVNKEMQSSNL YMSMSSWCYTHSLDGAGLFLFDHAAEEYEHAKKLIIFLNENNVPVQLTSI SAPEHKFEGLTQIFQKAYEHEQHISESINNIVDHAIKSKDHATFNFLQWY VAEQHEEEVLFKDILDKIELIGNENHGLYLADQYVKGIAKSRKSGS | 61 |
| | pCoV62 | His8-3c-RBD-Ferritin-V382R | 396 | HHHHHHHHGPLEVLFQGPNITNLCPFGEVFNATRFASVYAWNRKRISNCV ADYSVLYNSASFSTFKCYGRSPTKLNDLCFTNVYADSFVIRGDEVRQIAP GQTGKIADYNYKLPDDFTGCVIAWNSNNLDSKVGGNYNYLYRLFRKSNLK PFERDISTEIYQAGSTPCNGVEGFNCYFPLQSYGFQPTNGVGYQPYRVVV LSFELLHAPATVCGPGSGGGGESQVRQQFSKDIEKLLNEQVNKEMQSSNL YMSMSSWCYTHSLDGAGLFLFDHAAEEYEHAKKLIIFLNENNVPVQLTSI SAPEHKFEGLTQIFQKAYEHEQHISESINNIVDHAIKSKDHATFNFLQWY VAEQHEEEVLFKDILDKIELIGNENHGLYLADQYVKGIAKSRKSGS | 62 |
| | pCoV63 | His8-3c-RBD-Ferritin-F377R | 396 | HHHHHHHHGPLEVLFQGPNITNLCPFGEVFNATRFASVYAWNRKRISNCV ADYSVLYNSASFSTRKCYGVSPTKLNDLCFTNVYADSFVIRGDEVRQIAP GQTGKIADYNYKLPDDFTGCVIAWNSNNLDSKVGGNYNYLYRLFRKSNLK PFERDISTEIYQAGSTPCNGVEGFNCYFPLQSYGFQPTNGVGYQPYRVVV LSFELLHAPATVCGPGSGGGGESQVRQQFSKDIEKLLNEQVNKEMQSSNL YMSMSSWCYTHSLDGAGLFLFDHAAEEYEHAKKLIIFLNENNVPVQLTSI SAPEHKFEGLTQIFQKAYEHEQHISESINNIVDHAIKSKDHATFNFLQWY VAEQHEEEVLFKDILDKIELIGNENHGLYLADQYVKGIAKSRKSGS | 63 |
| | pCoV64 | NTD-Ferritin | | VNLTTRTQLPPAYTNSFTRGVYYPDKVFRSSVLHSTQDLFLPFFSNVTWF HAIHVSGTNGTKRFDNPVLPFNDGVYFASTEKSNIIRGWIFGTTLDSKTQ SLLIVNNATNVVIKVCEFQFCNDPFLGVYYHKNNKSWMESEFRVYSSANN CTFEYVSQPFLMDLEGKQGNFKNLREFVFKNIDGYFKIYSKHTPINLVRD LPQGFSALEPLVDLPIGINITRFQTLLALHRSYLTPGDSSSGWTAGAAAY YVGYLQPRTFLLKYNENGTITDAVDCALDPLSETKCTLGSGGGGESQVRQ QFSKDIEKLLNEQVNKEMQSSNLYMSMSSWCYTHSLDGAGLFLFDHAAEE YEHAKKLIIFLNENNVPVQLTSISAPEHKFEGLTQIFQKAYEHEQHISES INNIVDHAIKSKDHATFNFLQWYVAEQHEEEVLFKDILDKIELIGNENHG LYLADQYVKGIAKSRKSGS | 64 |
| | pCoV65 | His8-3c NTD-SSQC-Ferrritin | 491 | HHHHHHHHGPLEVLFQGPSSQCVNLTTRTQLPPAYTNSFTRGVYYPDKVF RSSVLHSTQDLFLPFFSNVTWFHAIHVSGTNGTKRFDNPVLPFNDGVYFA STEKSNIIRGWIFGTTLDSKTQSLLIVNNATNVVIKVCEFQFCNDPFLGV YYHKNNKSWMESEFRVYSSANNCTFEYVSQPFLMDLEGKQGNFKNLREFV FKNIDGYFKIYSKHTPINLVRDLPQGFSALEPLVDLPIGINITRFQTLLA LHRSYLTPGDSSSGWTAGAAAYYVGYLQPRTFLLKYNENGTITDAVDCAL DPLSETKCTLGSGGGGESQVRQQFSKDIEKLLNEQVNKEMQSSNLYMSMS SWCYTHSLDGAGLFLFDHAAEEYEHAKKLIIFLNENNVPVQLTSISAPEH KFEGLTQIFQKAYEHEQHISESINNIVDHAIKSKDHATFNFLQWYVAEQH EEEVLFKDILDKIELIGNENHGLYLADQYVKGIAKSRKSGS | 65 |
| | pCoV66 | NTD-SSQC-Ferrritin | 473 | SSQCVNLTTRTQLPPAYTNSFTRGVYYPDKVFRSSVLHSTQDLFLPFFSN VTWFHAIHVSGTNGTKRFDNPVLPFNDGVYFASTEKSNIIRGWIFGTTLD SKTQSLLIVNNATNVVIKVCEFQFCNDPFLGVYYHKNNKSWMESEFRVYS SANNCTFEYVSQPFLMDLEGKQGNFKNLREFVFKNIDGYFKIYSKHTPIN LVRDLPQGFSALEPLVDLPIGINITRFQTLLALHRSYLTPGDSSSGWTAG AAAYYVGYLQPRTFLLKYNENGTITDAVDCALDPLSETKCTLGSGGGGES QVRQQFSKDIEKLLNEQVNKEMQSSNLYMSMSSWCYTHSLDGAGLFLFDH AAEEYEHAKKLIIFLNENNVPVQLTSISAPEHKFEGLTQIFQKAYEHEQH ISESINNIVDHAIKSKDHATFNFLQWYVAEQHEEEVLFKDILDKIELIGN ENHGLYLADQYVKGIAKSRKSGS | 66 |
| | pCoV67 | His8-3c-S1-SSQC-Ferritin | 866 | HHHHHHHHGPLEVLFQGPSSQCVNLTTRTQLPPAYTNSFTRGVYYPDKVF RSSVLHSTQDLFLPFFSNVTWFHAIHVSGTNGTKRFDNPVLPFNDGVYFA STEKSNIIRGWIFGTTLDSKTQSLLIVNNATNVVIKVCEFQFCNDPFLGV YYHKNNKSWMESEFRVYSSANNCTFEYVSQPFLMDLEGKQGNFKNLREFV FKNIDGYFKIYSKHTPINLVRDLPQGFSALEPLVDLPIGINITRFQTLLA LHRSYLTPGDSSSGWTAGAAAYYVGYLQPRTFLLKYNENGTITDAVDCAL DPLSETKCTLKSFTVEKGIYQTSNFRVQPTESIVRFPNITNLCPFGEVFN ATRFASVYAWNRKRISNCVADYSVLYNSASFSTFKCYGVSPTKLNDLCFT NVYADSFVIRGDEVRQIAPGQTGKIADYNYKLPDDFTGCVIAWNSNNLDS KVGGNYNYLYRLFRKSNLKPFERDISTEIYQAGSTPCNGVEGFNCYFPLQ SYGFQPTNGVGYQPYRVVVLSFELLHAPATVCGPKKSTNLVKNKCVNFNF NGLTGTGVLTESNKKFLPFQQFGRDIADTTDAVRDPQTLEILDITPCSFG GVSVITPGTNTSNQVAVLYQDVNCTEVPVAIHADQLTPTWRVYSTGSNVF QTRAGCLIGAEHVNNSYECDIPIGAGICASYQTQTGSGGGGESQVRQQFS KDIEKLLNEQVNKEMQSSNLYMSMSSWCYTHSLDGAGLFLFDHAAEEYEH AKKLIIFLNENNVPVQLTSISAPEHKFEGLTQIFQKAYEHEQHISESINN IVDHAIKSKDHATFNFLQWYVAEQHEEEVLFKDILDKIELIGNENHGLYL ADQYVKGIAKSRKSGS | 67 |
| | pCoV68 | S1-SSQC-Ferritin | 848 | SSQCVNLTTRTQLPPAYTNSFTRGVYYPDKVFRSSVLHSTQDLFLPFFSN VTWFHAIHVSGTNGTKRFDNPVLPFNDGVYFASTEKSNIIRGWIFGTTLD SKTQSLLIVNNATNVVIKVCEFQFCNDPFLGVYYHKNNKSWMESEFRVYS SANNCTFEYVSQPFLMDLEGKQGNFKNLREFVFKNIDGYFKIYSKHTPIN LVRDLPQGFSALEPLVDLPIGINITRFQTLLALHRSYLTPGDSSSGWTAG AAAYYVGYLQPRTFLLKYNENGTITDAVDCALDPLSETKCTLKSFTVEKG IYQTSNFRVQPTESIVRFPNITNLCPFGEVFNATRFASVYAWNRKRISNC VADYSVLYNSASFSTFKCYGVSPTKLNDLCFTNVYADSFVIRGDEVRQIA PGQTGKIADYNYKLPDDFTGCVIAWNSNNLDSKVGGNYNYLYRLFRKSNL KPFERDISTEIYQAGSTPCNGVEGFNCYFPLQSYGFQPTNGVGYQPYRVV VLSFELLHAPATVCGPKKSTNLVKNKCVNFNFNGLTGTGVLTESNKKFLP FQQFGRDIADTTDAVRDPQTLEILDITPCSFGGVSVITPGTNTSNQVAVL YQDVNCTEVPVAIHADQLTPTWRVYSTGSNVFQTRAGCLIGAEHVNNSYE CDIPIGAGICASYQTQTGSGGGGESQVRQQFSKDIEKLLNEQVNKEMQSS NLYMSMSSWCYTHSLDGAGLFLFDHAAEEYEHAKKLIIFLNENNVPVQLT SISAPEHKFEGLTQIFQKAYEHEQHISESINNIVDHAIKSKDHATFNFLQ WYVAEQHEEEVLFKDILDKIELIGNENHGLYLADQYVKGIAKSRKSGS | 68 |
| | pCoV69 | PrefLead-S2P-Foldon-3c-Strep-His8 | 1,275 | SSQCVNLTTRTQLPPAYTNSFTRGVYYPDKVFRSSVLHSTQDLFLPFFSN VTWFHAIHVSGTNGTKRFDNPVLPFNDGVYFASTEKSNIIRGWIFGTTLD SKTQSLLIVNNATNVVIKVCEFQFCNDPFLGVYYHKNNKSWMESEFRVYS SANNCTFEYVSQPFLMDLEGKQGNFKNLREFVFKNIDGYFKIYSKHTPIN LVRDLPQGFSALEPLVDLPIGINITRFQTLLALHRSYLTPGDSSSGWTAG AAAYYVGYLQPRTFLLKYNENGTITDAVDCALDPLSETKCTLKSFTVEKG IYQTSNFRVQPTESIVRFPNITNLCPFGEVFNATRFASVYAWNRKRISNC VADYSVLYNSASFSTFKCYGVSPTKLNDLCFTNVYADSFVIRGDEVRQIA PGQTGKIADYNYKLPDDFTGCVIAWNSNNLDSKVGGNYNYLYRLFRKSNL KPFERDISTEIYQAGSTPCNGVEGFNCYFPLQSYGFQPTNGVGYQPYRVV VLSFELLHAPATVCGPKKSTNLVKNKCVNFNFNGLTGTGVLTESNKKFLP FQQFGRDIADTTDAVRDPQTLEILDITPCSFGGVSVITPGTNTSNQVAVL YQDVNCTEVPVAIHADQLTPTWRVYSTGSNVFQTRAGCLIGAEHVNNSYE CDIPIGAGICASYQTQTNSPGSASSVASQSIIAYTMSLGAENSVAYSNNS IAIPTNFTISVTTEILPVSMTKTSVDCTMYICGDSTECSNLLLQYGSFCT QLNRALTGIAVEQDKNTQEVFAQVKQIYKTPPIKDFGGFNFSQILPDPSK PSKRSFIEDLLFNKVTLADAGFIKQYGDCLGDIAARDLICAQKFNGLTVL PPLLTDEMIAQYTSALLAGTITSGWTFGAGAALQIPFAMQMAYRFNGIGV TQNVLYENQKLIANQFNSAIGKIQDSLSSTASALGKLQDVVNQNAQALNT LVKQLSSNFGAISSVLNDILSRLDPPEAEVQIDRLITGRLQSLQTYVTQQ LIRAAEIRASANLAATKMSECVLGQSKRVDFCGKGYHLMSFPQSAPHGVV FLHVTYVPAQEKNFTTAPAICHDGKAHFPREGVFVSNGTHWFVTQRNFYE PQIITTDNTFVSGNCDVVIGIVNNTVYDPLQPELDSFKEELDKYFKNHTS PDVDLGDISGINASVVNIQKEIDRLNEVAKNLNESLIDLQELGKYEQGSG YIPEAPRDGQAYVRKDGEWVLLSTFLGLEVLFQGPSAWSHPQFEKGGGSG GGSGGSAWSHPQFEKGSHHHHHHHH | 69 |
| Includes Native spike leader | pCoVIB-01 | S2P.1137-del-4-Ferritin | 1,291 | VNLTTRTQLPPAYTNSFTRGVYYPDKVFRSSVLHSTQDLFLPFFSNVTWF HAIHVSGTNGTKRFDNPVLPFNDGVYFASTEKSNIIRGWIFGTTLDSKTQ SLLIVNNATNVVIKVCEFQFCNDPFLGVYYHKNNKSWMESEFRVYSSANN CTFEYVSQPFLMDLEGKQGNFKNLREFVFKNIDGYFKIYSKHTPINLVRD LPQGFSALEPLVDLPIGINITRFQTLLALHRSYLTPGDSSSGWTAGAAAY YVGYLQPRTFLLKYNENGTITDAVDCALDPLSETKCTLKSFTVEKGIYQT SNFRVQPTESIVRFPNITNLCPFGEVFNATRFASVYAWNRKRISNCVADY SVLYNSASFSTFKCYGVSPTKLNDLCFTNVYADSFVIRGDEVRQIAPGQT GKIADYNYKLPDDFTGCVIAWNSNNLDSKVGGNYNYLYRLFRKSNLKPFE RDISTEIYQAGSTPCNGVEGFNCYFPLQSYGFQPTNGVGYQPYRVVVLSF ELLHAPATVCGPKKSTNLVKNKCVNFNFNGLTGTGVLTESNKKFLPFQQF GRDIADTTDAVRDPQTLEILDITPCSFGGVSVITPGTNTSNQVAVLYQDV NCTEVPVAIHADQLTPTWRVYSTGSNVFQTRAGCLIGAEHVNNSYECDIP IGAGICASYQTQTNSPGSASSVASQSIIAYTMSLGAENSVAYSNNSIAIP TNFTISVTTEILPVSMTKTSVDCTMYICGDSTECSNLLLQYGSFCTQLNR ALTGIAVEQDKNTQEVFAQVKQIYKTPPIKDFGGFNFSQILPDPSKPSKR SFIEDLLFNKVTLADAGFIKQYGDCLGDIAARDLICAQKFNGLTVLPPLL TDEMIAQYTSALLAGTITSGWTFGAGAALQIPFAMQMAYRFNGIGVTQNV LYENQKLIANQFNSAIGKIQDSLSSTASALGKLQDVVNQNAQALNTLVKQ LSSNFGAISSVLNDILSRLDPPEAEVQIDRLITGRLQSLQTYVTQQLIRA AEIRASANLAATKMSECVLGQSKRVDFCGKGYHLMSFPQSAPHGVVFLHV TYVPAQEKNFTTAPAICHDGKAHFPREGVFVSNGTHWFVTQRNFYEPQII TTDNTFVSGNCDVVIGIVNNTVGSGGDIIKLLNEQVNKEMQSSNLYMSMS SWCYTHSLDGAGLFLFDHAAEEYEHAKKLIIFLNENNVPVQLTSISAPEH KFEGLTQIFQKAYEHEQHISESINNIVDHAIKSKDHATFNFLQWYVAEQH EEEVLFKDILDKIELIGNENHGLYLADQYVKGIAKSRKSGS | 70 |
| | pCoV1B-02 | S2P.1137-del-6-Ferritin | 1,293 | VNLTTRTQLPPAYTNSFTRGVYYPDKVFRSSVLHSTQDLFLPFFSNVTWF HAIHVSGTNGTKRFDNPVLPFNDGVYFASTEKSNIIRGWIFGTTLDSKTQ SLLIVNNATNVVIKVCEFQFCNDPFLGVYYHKNNKSWMESEFRVYSSANN CTFEYVSQPFLMDLEGKQGNFKNLREFVFKNIDGYFKIYSKHTPINLVRD LPQGFSALEPLVDLPIGINITRFQTLLALHRSYLTPGDSSSGWTAGAAAY YVGYLQPRTFLLKYNENGTITDAVDCALDPLSETKCTLKSFTVEKGIYQT SNFRVQPTESIVRFPNITNLCPFGEVFNATRFASVYAWNRKRISNCVADY SVLYNSASFSTFKCYGVSPTKLNDLCFTNVYADSFVIRGDEVRQIAPGQT GKIADYNYKLPDDFTGCVIAWNSNNLDSKVGGNYNYLYRLFRKSNLKPFE RDISTEIYQAGSTPCNGVEGFNCYFPLQSYGFQPTNGVGYQPYRVVVLSF ELLHAPATVCGPKKSTNLVKNKCVNFNFNGLTGTGVLTESNKKFLPFQQF GRDIADTTDAVRDPQTLEILDITPCSFGGVSVITPGTNTSNQVAVLYQDV NCTEVPVAIHADQLTPTWRVYSTGSNVFQTRAGCLIGAEHVNNSYECDIP IGAGICASYQTQTNSPGSASSVASQSIIAYTMSLGAENSVAYSNNSIAIP TNFTISVTTEILPVSMTKTSVDCTMYICGDSTECSNLLLQYGSFCTQLNR ALTGIAVEQDKNTQEVFAQVKQIYKTPPIKDFGGFNFSQILPDPSKPSKR SFIEDLLFNKVTLADAGFIKQYGDCLGDIAARDLICAQKFNGLTVLPPLL TDEMIAQYTSALLAGTITSGWTFGAGAALQIPFAMQMAYRFNGIGVTQNV LYENQKLIANQFNSAIGKIQDSLSSTASALGKLQDVVNQNAQALNTLVKQ LSSNFGAISSVLNDILSRLDPPEAEVQIDRLITGRLQSLQTYVTQQLIRA AEIRASANLAATKMSECVLGQSKRVDFCGKGYHLMSFPQSAPHGVVFLHV TYVPAQEKNFTTAPAICHDGKAHFPREGVFVSNGTHWFVTQRNFYEPQII TTDNTFVSGNCDVVIGIVNNTVGSGGSGDIIKLLNEQVNKEMQSSNLYMS MSSWCYTHSLDGAGLFLFDHAAEEYEHAKKLIIFLNENNVPVQLTSISAP EHKFEGLTQIFQKAYEHEQHISESINNIVDHAIKSKDHATFNFLQWYVAE QHEEEVLFKDILDKIELIGNENHGLYLADQYVKGIAKSRKSGS | 71 |
| | pCoV1B-03 | S2P. 1208-del-Ferritin | 1,364 | VNLTTRTQLPPAYTNSFTRGVYYPDKVFRSSVLHSTQDLFLPFFSNVTWF HAIHVSGTNGTKRFDNPVLPFNDGVYFASTEKSNIIRGWIFGTTLDSKTQ SLLIVNNATNVVIKVCEFQFCNDPFLGVYYHKNNKSWMESEFRVYSSANN CTFEYVSQPFLMDLEGKQGNFKNLREFVFKNIDGYFKIYSKHTPINLVRD LPQGFSALEPLVDLPIGINITRFQTLLALHRSYLTPGDSSSGWTAGAAAY YVGYLQPRTFLLKYNENGTITDAVDCALDPLSETKCTLKSFTVEKGIYQT SNFRVQPTESIVRFPNITNLCPFGEVFNATRFASVYAWNRKRISNCVADY SVLYNSASFSTFKCYGVSPTKLNDLCFTNVYADSFVIRGDEVRQIAPGQT GKIADYNYKLPDDFTGCVIAWNSNNLDSKVGGNYNYLYRLFRKSNLKPFE RDISTEIYQAGSTPCNGVEGFNCYFPLQSYGFQPTNGVGYQPYRVVVLSF ELLHAPATVCGPKKSTNLVKNKCVNFNFNGLTGTGVLTESNKKFLPFQQF GRDIADTTDAVRDPQTLEILDITPCSFGGVSVITPGTNTSNQVAVLYQDV NCTEVPVAIHADQLTPTWRVYSTGSNVFQTRAGCLIGAEHVNNSYECDIP IGAGICASYQTQTNSPGSASSVASQSIIAYTMSLGAENSVAYSNNSIAIP TNFTISVTTEILPVSMTKTSVDCTMYICGDSTECSNLLLQYGSFCTQLNR ALTGIAVEQDKNTQEVFAQVKQIYKTPPIKDFGGFNFSQILPDPSKPSKR SFIEDLLFNKVTLADAGFIKQYGDCLGDIAARDLICAQKFNGLTVLPPLL TDEMIAQYTSALLAGTITSGWTFGAGAALQIPFAMQMAYRFNGIGVTQNV LYENQKLIANQFNSAIGKIQDSLSSTASALGKLQDVVNQNAQALNTLVKQ LSSNFGAISSVLNDILSRLDPPEAEVQIDRLITGRLQSLQTYVTQQLIRA AEIRASANLAATKMSECVLGQSKRVDFCGKGYHLMSFPQSAPHGVVFLHV TYVPAQEKNFTTAPAICHDGKAHFPREGVFVSNGTHWFVTQRNFYEPQII TTDNTFVSGNCDVVIGIVNNTVYDPLQPELDSFKEELDKYFKNHTSPDVD LGDISGINASVVNIQKEIDRLNEVAKNLNESLIDLQELGKYEQGSGGSGD IIKLLNEQVNKEMQSSNLYMSMSSWCYTHSLDGAGLFLFDHAAEEYEHAK KLIIFLNENNVPVQLTSISAPEHKFEGLTQIFQKAYEHEQHISESINNIV DHAIKSKDHATFNFLQWYVAEQHEEEVLFKDILDKIELIGNENHGLYLAD QYVKGIAKSRKSGS | 72 |
| | pCoV1B-04 | S2P.1208-GCN4-Ferritin | 1,400 | VNLTTRTQLPPAYTNSFTRGVYYPDKVFRSSVLHSTQDLFLPFFSNVTWF HAIHVSGTNGTKRFDNPVLPFNDGVYFASTEKSNIIRGWIFGTTLDSKTQ SLLIVNNATNVVIKVCEFQFCNDPFLGVYYHKNNKSWMESEFRVYSSANN CTFEYVSQPFLMDLEGKQGNFKNLREFVFKNIDGYFKIYSKHTPINLVRD LPQGFSALEPLVDLPIGINITRFQTLLALHRSYLTPGDSSSGWTAGAAAY YVGYLQPRTFLLKYNENGTITDAVDCALDPLSETKCTLKSFTVEKGIYQT SNFRVQPTESIVRFPNITNLCPFGEVFNATRFASVYAWNRKRISNCVADY SVLYNSASFSTFKCYGVSPTKLNDLCFTNVYADSFVIRGDEVRQIAPGQT GKIADYNYKLPDDFTGCVIAWNSNNLDSKVGGNYNYLYRLFRKSNLKPFE RDISTEIYQAGSTPCNGVEGFNCYFPLQSYGFQPTNGVGYQPYRVVVLSF ELLHAPATVCGPKKSTNLVKNKCVNFNFNGLTGTGVLTESNKKFLPFQQF GRDIA DTTDAVRDPQTLEILDITPCSFGGVSVITPGTNTSNQVAVLYQDVNCTEV PVAIHADQLTPTWRVYSTGSNVFQTRAGCLIGAEHVNNSYECDIPIGAGI CASYQTQTNSPGSASSVASQSIIAYTMSLGAENSVAYSNNSIAIPTNFTI SVTTEILPVSMTKTSVDCTMYICGDSTECSNLLLQYGSFCTQLNRALTGI AVEQDKNTQEVFAQVKQIYKTPPIKDFGGFNFSQILPDPSKPSKRSFIED LLFNKVTLADAGFIKQYGDCLGDIAARDLICAQKFNGLTVLPPLLTDEMI AQYTSALLAGTITSGWTFGAGAALQIPFAMQMAYRFNGIGVTQNVLYENQ KLIANQFNSAIGKIQDSLSSTASALGKLQDVVNQNAQALNTLVKQLSSNF GAISSVLNDILSRLDPPEAEVQIDRLITGRLQSLQTYVTQQLIRAAEIRA SANLAATKMSECVLGQSKRVDFCGKGYHLMSFPQSAPHGVVFLHVTYVPA QEKNFTTAPAICHDGKAHFPREGVFVSNGTHWFVTQRNFYEPQIITTDNT FVSGNCDVVIGIVNNTVYDPLQPELDSFKEELDKYFKNHTSPDVDLGDIS GINASVVNIQKEIDRLNEVAKNLNESLIDLQELGKYEQGSGGEMKQIEDK IEEILSKIYHIENEIARIKKLIGRGSGGSGDIIKLLNEQVNKEMQSSNLY MSMSSWCYTHSLDGAGLFLFDHAAEEYEHAKKLIIFLNENNVPVQLTSIS APEHKFEGLTQIFQKAYEHEQHISESINNIVDHAIKSKDHATFNFLQWYV AEQHEEEVLFKDILDKIELIGNENHGLYLADQYVKGIAKSRKSGS | 73 |
| | pCoV1B-05 | S2P.1154-del-Ferritin | 1,310 | VNLTTRTQLPPAYTNSFTRGVYYPDKVFRSSVLHSTQDLFLPFFSNVTWF HAIHVSGTNGTKRFDNPVLPFNDGVYFASTEKSNIIRGWIFGTTLDSKTQ SLLIVNNATNVVIKVCEFQFCNDPFLGVYYHKNNKSWMESEFRVYSSANN CTFEYVSQPFLMDLEGKQGNFKNLREFVFKNIDGYFKIYSKHTPINLVRD LPQGFSALEPLVDLPIGINITRFQTLLALHRSYLTPGDSSSGWTAGAAAY YVGYLQPRTFLLKYNENGTITDAVDCALDPLSETKCTLKSFTVEKGIYQT SNFRVQPTESIVRFPNITNLCPFGEVFNATRFASVYAWNRKRISNCVADY SVLYNSASFSTFKCYGVSPTKLNDLCFTNVYADSFVIRGDEVRQIAPGQT GKIADYNYKLPDDFTGCVIAWNSNNLDSKVGGNYNYLYRLFRKSNLKPFE RDISTEIYQAGSTPCNGVEGFNCYFPLQSYGFQPTNGVGYQPYRVVVLSF ELLHAPATVCGPKKSTNLVKNKCVNFNFNGLTGTGVLTESNKKFLPFQQF GRDIADTTDAVRDPQTLEILDITPCSFGGVSVITPGTNTSNQVAVLYQDV NCTEVPVAIHADQLTPTWRVYSTGSNVFQTRAGCLIGAEHVNNSYECDIP IGAGICASYQTQTNSPGSASSVASQSIIAYTMSLGAENSVAYSNNSIAIP TNFTISVTTEILPVSMTKTSVDCTMYICGDSTECSNLLLQYGSFCTQLNR ALTGIAVEQDKNTQEVFAQVKQIYKTPPIKDFGGFNFSQILPDPSKPSKR SFIEDLLFNKVTLADAGFIKQYGDCLGDIAARDLICAQKFNGLTVLPPLL TDEMIAQYTSALLAGTITSGWTFGAGAALQIPFAMQMAYRFNGIGVTQNV LYENQKLIANQFNSAIGKIQDSLSSTASALGKLQDVVNQNAQALNTLVKQ LSSNFGAISSVLNDILSRLDPPEAEVQIDRLITGRLQSLQTYVTQQLIRA AEIRASANLAATKMSECVLGQSKRVDFCGKGYHLMSFPQSAPHGVVFLHV TYVPAQEKNFTTAPAICHDGKAHFPREGVFVSNGTHWFVTQRNFYEPQII TTDNTFVSGNCDVVIGIVNNTVYDPLQPELDSFKEELDKGSGGSGDIIKL LNEQVNKEMQSSNLYMSMSSWCYTHSLDGAGLFLFDHAAEEYEHAKKLII FLNENNVPVQLTSISAPEHKFEGLTQIFQKAYEHEQHISESINNIVDHAI KSKDHATFNFLQWYVAEQHEEEVLFKDILDKIELIGNENHGLYLADQYVK GIAKSRKSGS | 74 |
| | pCoV1B-06 | S2P.1158op1-del-Ferritin | 1,314 | VNLTTRTQLPPAYTNSFTRGVYYPDKVFRSSVLHSTQDLFLPFFSNVTWF HAIHVSGTNGTKRFDNPVLPFNDGVYFASTEKSNIIRGWIFGTTLDSKTQ SLLIVNNATNVVIKVCEFQFCNDPFLGVYYHKNNKSWMESEFRVYSSANN CTFEYVSQPFLMDLEGKQGNFKNLREFVFKNIDGYFKIYSKHTPINLVRD LPQGFSALEPLVDLPIGINITRFQTLLALHRSYLTPGDSSSGWTAGAAAY YVGYLQPRTFLLKYNENGTITDAVDCALDPLSETKCTLKSFTVEKGIYQT SNFRVQPTESIVRFPNITNLCPFGEVFNATRFASVYAWNRKRISNCVADY SVLYNSASFSTFKCYGVSPTKLNDLCFTNVYADSFVIRGDEVRQIAPGQT GKIADYNYKLPDDFTGCVIAWNSNNLDSKVGGNYNYLYRLFRKSNLKPFE RDISTEIYQAGSTPCNGVEGFNCYFPLQSYGFQPTNGVGYQPYRVVVLSF ELLHAPATVCGPKKSTNLVKNKCVNFNFNGLTGTGVLTESNKKFLPFQQF GRDIADTTDAVRDPQTLEILDITPCSFGGVSVITPGTNTSNQVAVLYQDV NCTEVPVAIHADQLTPTWRVYSTGSNVFQTRAGCLIGAEHVNNSYECDIP IGAGICASYQTQTNSPGSASSVASQSIIAYTMSLGAENSVAYSNNSIAIP TNFTISVTTEILPVSMTKTSVDCTMYICGDSTECSNLLLQYGSFCTQLNR ALTGIAVEQDKNTQEVFAQVKQIYKTPPIKDFGGFNFSQILPDPSKPSKR SFIEDLLFNKVTLADAGFIKQYGDCLGDIAARDLICAQKFNGLTVLPPLL TDEMIAQYTSALLAGTITSGWTFGAGAALQIPFAMQMAYRFNGIGVTQNV LYENQKLIANQFNSAIGKIQDSLSSTASALGKLQDVVNQNAQALNTLVKQ LSSNFGAISSVLNDILSRLDPPEAEVQIDRLITGRLQSLQTYVTQQLIRA AEIRASANLAATKMSECVLGQSKRVDFCGKGYHLMSFPQSAPHGVVFLHV TYVPAQEKNFTTAPAICHDGKAHFPREGVFVSNGTHWFVTQRNFYEPQII TTDNTFVSGNCDVVIGIVNNTVYDPLQSELDSIKEELDKIHKNGSGGSGD IIKLLNEQVNKEMQSSNLYMSMSSWCYTHSLDGAGLFLFDHAAEEYEHAK KLIIFLNENNVPVQLTSISAPEHKFEGLTQIFQKAYEHEQHISESINNIV DHAIKSKDHATFNFLQWYVAEQHEEEVLFKDILDKIELIGNENHGLYLAD QYVKGIAKSRKSGS | 75 |
| | pCoV1B-07 | S2P.1158op2-del-Ferritin | 1,314 | VNLTTRTQLPPAYTNSFTRGVYYPDKVFRSSVLHSTQDLFLPFFSNVTWF HAIHVSGTNGTKRFDNPVLPFNDGVYFASTEKSNIIRGWIFGTTLDSKTQ SLLIVNNATNVVIKVCEFQFCNDPFLGVYYHKNNKSWMESEFRVYSSANN CTFEYVSQPFLMDLEGKQGNFKNLREFVFKNIDGYFKIYSKHTPINLVRD LPQGFSALEPLVDLPIGINITRFQTLLALHRSYLTPGDSSSGWTAGAAAY YVGYLQPRTFLLKYNENGTITDAVDCALDPLSETKCTLKSFTVEKGIYQT SNFRVQPTESIVRFPNITNLCPFGEVFNATRFASVYAWNRKRISNCVADY SVLYNSASFSTFKCYGVSPTKLNDLCFTNVYADSFVIRGDEVRQIAPGQT GKIADYNYKLPDDFTGCVIAWNSNNLDSKVGGNYNYLYRLFRKSNLKPFE RDISTEIYQAGSTPCNGVEGFNCYFPLQSYGFQPTNGVGYQPYRVVVLSF ELLHAPATVCGPKKSTNLVKNKCVNFNFNGLTGTGVLTESNKKFLPFQQF GRDIADTTDAVRDPQTLEILDITPCSFGGVSVITPGTNTSNQVAVLYQDV NCTEVPVAIHADQLTPTWRVYSTGSNVFQTRAGCLIGAEHVNNSYECDIP IGAGICASYQTQTNSPGSASSVASQSIIAYTMSLGAENSVAYSNNSIAIP TNFTISVTTEILPVSMTKTSVDCTMYICGDSTECSNLLLQYGSFCTQLNR ALTGIAVEQDKNTQEVFAQVKQIYKTPPIKDFGGFNFSQILPDPSKPSKR SFIEDLLFNKVTLADAGFIKQYGDCLGDIAARDLICAQKFNGLTVLPPLL TDEMIAQYTSALLAGTITSGWTFGAGAALQIPFAMQMAYRFNGIGVTQNV LYENQKLIANQFNSAIGKIQDSLSSTASALGKLQDVVNQNAQALNTLVKQ LSSNFGAISSVLNDILSRLDPPEAEVQIDRLITGRLQSLQTYVTQQLIRA AEIRASANLAATKMSECVLGQSKRVDFCGKGYHLMSFPQSAPHGVVFLHV TYVPAQEKNFTTAPAICHDGKAHFPREGVFVSNGTHWFVTQRNFYEPQII TTDNTFVSGNCDVVIGIVNNTVYDPLQSEIDSIKEEIDKIHKNGSGGSGD IIKLLNEQVNKEMQSSNLYMSMSSWCYTHSLDGAGLFLFDHAAEEYEHAK KLIIFLNENNVPVQLTSISAPEHKFEGLTQIFQKAYEHEQHISESINNIV DHAIKSKDHATFNFLQWYVAEQHEEEVLFKDILDKIELIGNENHGLYLAD QYVKGIAKSRKSGS | 76 |
| | pCoV1B-08 | S2P.1158oplx 2-del-Ferritin | 1,328 | VNLTTRTQLPPAYTNSFTRGVYYPDKVFRSSVLHSTQDLFLPFFSNVTWF HAIHVSGTNGTKRFDNPVLPFNDGVYFASTEKSNIIRGWIFGTTLDSKTQ S LLIVNNATNVVIKVCEFQFCNDPFLGVYYHKNNKSWMESEFRVYSSANN CTFEYVSQPFLMDLEGKQGNFKNLREFVFKNIDGYFKIYSKHTPINLVRD L PQGFSALEPLVDLPIGINITRFQTLLALHRSYLTPGDSSSGWTAGAAAYY V GYLQPRTFLLKYNENGTITDAVDCALDPLSETKCTLKSFTVEKGIYQTSN F RVQPTESIVRFPNITNLCPFGEVFNATRFASVYAWNRKRISNCVADYSVL Y NSASFSTFKCYGVSPTKLNDLCFTNVYADSFVIRGDEVRQIAPGQTGKIA D YNYKLPDDFTGCVIAWNSNNLDSKVGGNYNYLYRLFRKSNLKPFERDIST EIYQAGSTPCNGVEGFNCYFPLQSYGFQPTNGVGYQPYRVVVLSFELLHA PATVCGPKKSTNLVKNKCVNFNFNGLTGTGVLTESNKKFLPFQQFGRDIA DTTDAVRDPQTLEILDITPCSFGGVSVITPGTNTSNQVAVLYQDVNCTEV P VAIHADQLTPTWRVYSTGSNVFQTRAGCLIGAEHVNNSYECDIPIGAGIC A SYQTQTNSPGSASSVASQSIIAYTMSLGAENSVAYSNNSIAIPTNFTISV TTE ILPVSMTKTSVDCTMYICGDSTECSNLLLQYGSFCTQLNRALTGIAVEQD K NTQEVFAQVKQIYKTPPIKDFGGFNFSQILPDPSKPSKRSFIEDLLFNKV TL ADAGFIKQYGDCLGDIAARDLICAQKFNGLTVLPPLLTDEMIAQYTSALL AGTITSGWTFGAGAALQIPFAMQMAYRFNGIGVTQNVLYENQKLIANQF NSAIGKIQDSLSSTASALGKLQDVVNQNAQALNTLVKQLSSNFGAISSVL N DILSRLDPPEAEVQIDRLITGRLQSLQTYVTQQLIRAAEIRASANLAATK MS ECVLGQSKRVDFCGKGYHLMSFPQSAPHGVVFLHVTYVPAQEKNFTTAP AICHDGKAHFPREGVFVSNGTHWFVTQRNFYEPQIITTDNTFVSGNCDVV I GIVNNTVYDPLQSELDSIKEELDKIHKNLDSIKEELDKIHKNGSGGSGDI IK LLNEQVNKEMQSSNLYMSMSSWCYTHSLDGAGLFLFDHAAEEYEHAKK LIIFLNENNVPVQLTSISAPEHKFEGLTQIFQKAYEHEQHISESINNIVD HAIK SKDHATFNFLQWYVAEQHEEEVLFKDILDKIELIGNENHGLYLADQYVKG IAKSRKSGS | 77 |
| | pCoV1B-09 | S2P.1158op2x 2-del-Ferritin | 1,328 | VNLTTRTQLPPAYTNSFTRGVYYPDKVFRSSVLHSTQDLFLPFFSNVTWF HAIHVSGTNGTKRFDNPVLPFNDGVYFASTEKSNIIRGWIFGTTLDSKTQ S LLIVNNATNVVIKVCEFQFCNDPFLGVYYHKNNKSWMESEFRVYSSANN CTFEYVSQPFLMDLEGKQGNFKNLREFVFKNIDGYFKIYSKHTPINLVRD L PQGFSALEPLVDLPIGINITRFQTLLALHRSYLTPGDSSSGWTAGAAAYY V GYLQPRTFLLKYNENGTITDAVDCALDPLSETKCTLKSFTVEKGIYQTSN F RVQPTESIVRFPNITNLCPFGEVFNATRFASVYAWNRKRISNCVADYSVL Y NSASFSTFKCYGVSPTKLNDLCFTNVYADSFVIRGDEVRQIAPGQTGKIA D YNYKLPDDFTGCVIAWNSNNLDSKVGGNYNYLYRLFRKSNLKPFERDIST EIYQAGSTPCNGVEGFNCYFPLQSYGFQPTNGVGYQPYRVVVLSFELLHA PATVCGPKKSTNLVKNKCVNFNFNGLTGTGVLTESNKKFLPFQQFGRDIA DTTDAVRDPQTLEILDITPCSFGGVSVITPGTNTSNQVAVLYQDVNCTEV P VAIHADQLTPTWRVYSTGSNVFQTRAGCLIGAEHVNNSYECDIPIGAGIC A SYQTQTNSPGSASSVASQSIIAYTMSLGAENSVAYSNNSIAIPTNFTISV TTE ILPVSMTKTSVDCTMYICGDSTECSNLLLQYGSFCTQLNRALTGIAVEQD K NTQEVFAQVKQIYKTPPIKDFGGFNFSQILPDPSKPSKRSFIEDLLFNKV TL ADAGFIKQYGDCLGDIAARDLICAQKFNGLTVLPPLLTDEMIAQYTSALL AGTITSGWTFGAGAALQIPFAMQMAYRFNGIGVTQNVLYENQKLIANQF NSAIGKIQDSLSSTASALGKLQDVVNQNAQALNTLVKQLSSNFGAISSVL N DILSRLDPPEAEVQIDRLITGRLQSLQTYVTQQLIRAAEIRASANLAATK MS ECVLGQSKRVDFCGKGYHLMSFPQSAPHGVVFLHVTYVPAQEKNFTTAP AICHDGKAHFPREGVFVSNGTHWFVTQRNFYEPQIITTDNTFVSGNCDVV I GIVNNTVYDPLQSEIDSIKEEIDKIHKNIDSIKEEIDKIHKNGSGGSGDI IKLL NEQVNKEMQSSNLYMSMSSWCYTHSLDGAGLFLFDHAAEEYEHAKKLII FLNENNVPVQLTSISAPEHKFEGLTQIFQKAYEHEQHISESINNIVDHAI KS KDHATFNFLQWYVAEQHEEEVLFKDILDKIELIGNENHGLYLADQYVKGI AKSRKSGS | 78 |
| | pCoV1B-10 | S2P.1158op1-fGCN4-del-Ferritin | 1,345 | VNLTTRTQLPPAYTNSFTRGVYYPDKVFRSSVLHSTQDLFLPFFSNVTWF HAIHVSGTNGTKRFDNPVLPFNDGVYFASTEKSNIIRGWIFGTTLDSKTQ S LLIVNNATNVVIKVCEFQFCNDPFLGVYYHKNNKSWMESEFRVYSSANN CTFEYVSQPFLMDLEGKQGNFKNLREFVFKNIDGYFKIYSKHTPINLVRD L PQGFSALEPLVDLPIGINITRFQTLLALHRSYLTPGDSSSGWTAGAAAYY V GYLQPRTFLLKYNENGTITDAVDCALDPLSETKCTLKSFTVEKGIYQTSN F RVQPTESIVRFPNITNLCPFGEVFNATRFASVYAWNRKRISNCVADYSVL Y NSASFSTFKCYGVSPTKLNDLCFTNVYADSFVIRGDEVRQIAPGQTGKIA D YNYKLPDDFTGCVIAWNSNNLDSKVGGNYNYLYRLFRKSNLKPFERDIST EIYQAGSTPCNGVEGFNCYFPLQSYGFQPTNGVGYQPYRVVVLSFELLHA PATVCGPKKSTNLVKNKCVNFNFNGLTGTGVLTESNKKFLPFQQFGRDIA DTTDAVRDPQTLEILDITPCSFGGVSVITPGTNTSNQVAVLYQDVNCTEV P VAIHADQLTPTWRVYSTGSNVFQTRAGCLIGAEHVNNSYECDIPIGAGIC A SYQTQTNSPGSASSVASQSIIAYTMSLGAENSVAYSNNSIAIPTNFTISV TTE ILPVSMTKTSVDCTMYICGDSTECSNLLLQYGSFCTQLNRALTGIAVEQD K NTQEVFAQVKQIYKTPPIKDFGGFNFSQILPDPSKPSKRSFIEDLLFNKV TL ADAGFIKQYGDCLGDIAARDLICAQKFNGLTVLPPLLTDEMIAQYTSALL AGTITSGWTFGAGAALQIPFAMQMAYRFNGIGVTQNVLYENQKLIANQF NSAIGKIQDSLSSTASALGKLQDVVNQNAQALNTLVKQLSSNFGAISSVL N DILSRLDPPEAEVQIDRLITGRLQSLQTYVTQQLIRAAEIRASANLAATK MS ECVLGQSKRVDFCGKGYHLMSFPQSAPHGVVFLHVTYVPAQEKNFTTAP AICHDGKAHFPREGVFVSNGTHWFVTQRNFYEPQIITTDNTFVSGNCDVV I GIVNNTVYDPLQSELDSIKEELDKIHKNMKQIEDKIEEILSKIYHIENEI ARI KKLIGRGSGGSGDIIKLLNEQVNKEMQSSNLYMSMSSWCYTHSLDGAGL FLFDHAAEEYEHAKKLIIFLNENNVPVQLTSISAPEHKFEGLTQIFQKAY EH EQHISESINNIVDHAIKSKDHATFNFLQWYVAEQHEEEVLFKDILDKIEL IG NENHGLYLADQYVKGIAKSRKSGS | 79 |
| | pCoV1B-01-PL | PrefLead-S2P.1137-del-4-Ferritin | 1,295 | SSQCVNLTTRTQLPPAYTNSFTRGVYYPDKVFRSSVLHSTQDLFLPFFSN V TWFHAIHVSGTNGTKRFDNPVLPFNDGVYFASTEKSNIIRGWIFGTTLDS K TQSLLIVNNATNVVIKVCEFQFCNDPFLGVYYHKNNKSWMESEFRVYSSA NNCTFEYVSQPFLMDLEGKQGNFKNLREFVFKNIDGYFKIYSKHTPINLV R DLPQGFSALEPLVDLPIGINITRFQTLLALHRSYLTPGDSSSGWTAGAAA Y YVGYLQPRTFLLKYNENGTITDAVDCALDPLSETKCTLKSFTVEKGIYQT S NFRVQPTESIVRFPNITNLCPFGEVFNATRFASVYAWNRKRISNCVADYS V LYNSASFSTFKCYGVSPTKLNDLCFTNVYADSFVIRGDEVRQIAPGQTGK I ADYNYKLPDDFTGCVIAWNSNNLDSKVGGNYNYLYRLFRKSNLKPFERD ISTEIYQAGSTPCNGVEGFNCYFPLQSYGFQPTNGVGYQPYRVVVLSFEL L HAPATVCGPKKSTNLVKNKCVNFNFNGLTGTGVLTESNKKFLPFQQFGR DIADTTDAVRDPQTLEILDITPCSFGGVSVITPGTNTSNQVAVLYQDVNC T EVPVAIHADQLTPTWRVYSTGSNVFQTRAGCLIGAEHVNNSYECDIPIGA GICASYQTQTNSPGSASSVASQSIIAYTMSLGAENSVAYSNNSIAIPTNF TIS VTTEILPVSMTKTSVDCTMYICGDSTECSNLLLQYGSFCTQLNRALTGIA V EQDKNTQEVFAQVKQIYKTPPIKDFGGFNFSQILPDPSKPSKRSFIEDLL FN KVTLADAGFIKQYGDCLGDIAARDLICAQKFNGLTVLPPLLTDEMIAQYT SALLAGTITSGWTFGAGAALQIPFAMQMAYRFNGIGVTQNVLYENQKLIA NQFNSAIGKIQDSLSSTASALGKLQDVVNQNAQALNTLVKQLSSNFGAIS S VLNDILSRLDPPEAEVQIDRLITGRLQSLQTYVTQQLIRAAEIRASANLA AT KMSECVLGQSKRVDFCGKGYHLMSFPQSAPHGVVFLHVTYVPAQEKNFT TAPAICHDGKAHFPREGVFVSNGTHWFVTQRNFYEPQIITTDNTFVSGNC DVVIGIVNNTVGSGGDIIKLLNEQVNKEMQSSNLYMSMSSWCYTHSLDG AGLFLFDHAAEEYEHAKKLIIFLNENNVPVQLTSISAPEHKFEGLTQIFQ KA YEHEQHISESINNIVDHAIKSKDHATFNFLQWYVAEQHEEEVLFKDILDK I ELIGNENHGLYLADQYVKGIAKSRKSGS | 80 |
| | pCoV1B-02-PL | PrefLead-S2P.1137-del-6-Ferritin | 1,297 | SSQCVNLTTRTQLPPAYTNSFTRGVYYPDKVFRSSVLHSTQDLFLPFFSN V TWFHAIHVSGTNGTKRFDNPVLPFNDGVYFASTEKSNIIRGWIFGTTLDS K TQSLLIVNNATNVVIKVCEFQFCNDPFLGVYYHKNNKSWMESEFRVYSSA NNCTFEYVSQPFLMDLEGKQGNFKNLREFVFKNIDGYFKIYSKHTPINLV R DLPQGFSALEPLVDLPIGINITRFQTLLALHRSYLTPGDSSSGWTAGAAA Y YVGYLQPRTFLLKYNENGTITDAVDCALDPLSETKCTLKSFTVEKGIYQT S NFRVQPTESIVRFPNITNLCPFGEVFNATRFASVYAWNRKRISNCVADYS V LYNSASFSTFKCYGVSPTKLNDLCFTNVYADSFVIRGDEVRQIAPGQTGK I ADYNYKLPDDFTGCVIAWNSNNLDSKVGGNYNYLYRLFRKSNLKPFERD ISTEIYQAGSTPCNGVEGFNCYFPLQSYGFQPTNGVGYQPYRVVVLSFEL L HAPATVCGPKKSTNLVKNKCVNFNFNGLTGTGVLTESNKKFLPFQQFGR DIADTTDAVRDPQTLEILDITPCSFGGVSVITPGTNTSNQVAVLYQDVNC T EVPVAIHADQLTPTWRVYSTGSNVFQTRAGCLIGAEHVNNSYECDIPIGA GICASYQTQTNSPGSASSVASQSIIAYTMSLGAENSVAYSNNSIAIPTNF TIS VTTEILPVSMTKTSVDCTMYICGDSTECSNLLLQYGSFCTQLNRALTGIA V EQDKNTQEVFAQVKQIYKTPPIKDFGGFNFSQILPDPSKPSKRSFIEDLL FN KVTLADAGFIKQYGDCLGDIAARDLICAQKFNGLTVLPPLLTDEMIAQYT SALLAGTITSGWTFGAGAALQIPFAMQMAYRFNGIGVTQNVLYENQKLIA NQFNSAIGKIQDSLSSTASALGKLQDVVNQNAQALNTLVKQLSSNFGAIS S VLNDILSRLDPPEAEVQIDRLITGRLQSLQTYVTQQLIRAAEIRASANLA AT KMSECVLGQSKRVDFCGKGYHLMSFPQSAPHGVVFLHVTYVPAQEKNFT TAPAICHDGKAHFPREGVFVSNGTHWFVTQRNFYEPQIITTDNTFVSGNC DVVIGIVNNTVGSGGSGDIIKLLNEQVNKEMQSSNLYMSMSSWCYTHSLD GAGLFLFDHAAEEYEHAKKLIIFLNENNVPVQLTSISAPEHKFEGLTQIF QK AYEHEQHISESINNIVDHAIKSKDHATFNFLQWYVAEQHEEEVLFKDILD K IELIGNENHGLYLADQYVKGIAKSRKSGS | 81 |
| | pCoV1B-03-PL | PrefLead-S2P.1208-del-Ferritin | 1,368 | SSQCVNLTTRTQLPPAYTNSFTRGVYYPDKVFRSSVLHSTQDLFLPFFSN V TWFHAIHVSGTNGTKRFDNPVLPFNDGVYFASTEKSNIIRGWIFGTTLDS K TQSLLIVNNATNVVIKVCEFQFCNDPFLGVYYHKNNKSWMESEFRVYSSA NNCTFEYVSQPFLMDLEGKQGNFKNLREFVFKNIDGYFKIYSKHTPINLV R DLPQGFSALEPLVDLPIGINITRFQTLLALHRSYLTPGDSSSGWTAGAAA Y YVGYLQPRTFLLKYNENGTITDAVDCALDPLSETKCTLKSFTVEKGIYQT S NFRVQPTESIVRFPNITNLCPFGEVFNATRFASVYAWNRKRISNCVADYS V LYNSASFSTFKCYGVSPTKLNDLCFTNVYADSFVIRGDEVRQIAPGQTGK I ADYNYKLPDDFTGCVIAWNSNNLDSKVGGNYNYLYRLFRKSNLKPFERD ISTEIYQAGSTPCNGVEGFNCYFPLQSYGFQPTNGVGYQPYRVVVLSFEL L HAPATVCGPKKSTNLVKNKCVNFNFNGLTGTGVLTESNKKFLPFQQFGR DIADTTDAVRDPQTLEILDITPCSFGGVSVITPGTNTSNQVAVLYQDVNC T EVPVAIHADQLTPTWRVYSTGSNVFQTRAGCLIGAEHVNNSYECDIPIGA GICASYQTQTNSPGSASSVASQSIIAYTMSLGAENSVAYSNNSIAIPTNF TIS VTTEILPVSMTKTSVDCTMYICGDSTECSNLLLQYGSFCTQLNRALTGIA V EQDKNTQEVFAQVKQIYKTPPIKDFGGFNFSQILPDPSKPSKRSFIEDLL FN KVTLADAGFIKQYGDCLGDIAARDLICAQKFNGLTVLPPLLTDEMIAQYT SALLAGTITSGWTFGAGAALQIPFAMQMAYRFNGIGVTQNVLYENQKLIA NQFNSAIGKIQDSLSSTASALGKLQDVVNQNAQALNTLVKQLSSNFGAIS S VLNDILSRLDPPEAEVQIDRLITGRLQSLQTYVTQQLIRAAEIRASANLA AT KMSECVLGQSKRVDFCGKGYHLMSFPQSAPHGVVFLHVTYVPAQEKNFT TAPAICHDGKAHFPREGVFVSNGTHWFVTQRNFYEPQIITTDNTFVSGNC DVVIGIVNNTVYDPLQPELDSFKEELDKYFKNHTSPDVDLGDISGINASV V NIQKEIDRLNEVAKNLNESLIDLQELGKYEQGSGGSGDIIKLLNEQVNKE M QSSNLYMSMSSWCYTHSLDGAGLFLFDHAAEEYEHAKKLIIFLNENNVPV QLTSISAPEHKFEGLTQIFQKAYEHEQHISESINNIVDHAIKSKDHATFN FL QWYVAEQHEEEVLFKDILDKIELIGNENHGLYLADQYVKGIAKSRKSGS | 82 |
| | pCoV1B-04-PL | PrefLead-S2P.1208-GCN4-Ferritin | 1,404 | SSQCVNLTTRTQLPPAYTNSFTRGVYYPDKVFRSSVLHSTQDLFLPFFSN V TWFHAIHVSGTNGTKRFDNPVLPFNDGVYFASTEKSNIIRGWIFGTTLDS K TQSLLIVNNATNVVIKVCEFQFCNDPFLGVYYHKNNKSWMESEFRVYSSA NNCTFEYVSQPFLMDLEGKQGNFKNLREFVFKNIDGYFKIYSKHTPINLV R DLPQGFSALEPLVDLPIGINITRFQTLLALHRSYLTPGDSSSGWTAGAAA Y YVGYLQPRTFLLKYNENGTITDAVDCALDPLSETKCTLKSFTVEKGIYQT S NFRVQPTESIVRFPNITNLCPFGEVFNATRFASVYAWNRKRISNCVADYS V LYNSASFSTFKCYGVSPTKLNDLCFTNVYADSFVIRGDEVRQIAPGQTGK I ADYNYKLPDDFTGCVIAWNSNNLDSKVGGNYNYLYRLFRKSNLKPFERD ISTEIYQAGSTPCNGVEGFNCYFPLQSYGFQPTNGVGYQPYRVVVLSFEL L HAPATVCGPKKSTNLVKNKCVNFNFNGLTGTGVLTESNKKFLPFQQFGR DIADTTDAVRDPQTLEILDITPCSFGGVSVITPGTNTSNQVAVLYQDVNC T EVPVAIHADQLTPTWRVYSTGSNVFQTRAGCLIGAEHVNNSYECDIPIGA GICASYQTQTNSPGSASSVASQSIIAYTMSLGAENSVAYSNNSIAIPTNF TIS VTTEILPVSMTKTSVDCTMYICGDSTECSNLLLQYGSFCTQLNRALTGIA V EQDKNTQEVFAQVKQIYKTPPIKDFGGFNFSQILPDPSKPSKRSFIEDLL FN KVTLADAGFIKQYGDCLGDIAARDLICAQKFNGLTVLPPLLTDEMIAQYT SALLAGTITSGWTFGAGAALQIPFAMQMAYRFNGIGVTQNVLYENQKLIA NQFNSAIGKIQDSLSSTASALGKLQDVVNQNAQALNTLVKQLSSNFGAIS S VLNDILSRLDPPEAEVQIDRLITGRLQSLQTYVTQQLIRAAEIRASANLA AT KMSECVLGQSKRVDFCGKGYHLMSFPQSAPHGVVFLHVTYVPAQEKNFT TAPAICHDGKAHFPREGVFVSNGTHWFVTQRNFYEPQIITTDNTFVSGNC DVVIGIVNNTVYDPLQPELDSFKEELDKYFKNHTSPDVDLGDISGINASV V NIQKEIDRLNEVAKNLNESLIDLQELGKYEQGSGGEMKQIEDKIEEILSK IY HIENEIARIKKLIGRGSGGSGDIIKLLNEQVNKEMQSSNLYMSMSSWCYT H SLDGAGLFLFDHAAEEYEHAKKLIIFLNENNVPVQLTSISAPEHKFEGLT QI FQKAYEHEQHISESINNIVDHAIKSKDHATFNFLQWYVAEQHEEEVLFKD I LDKIELIGNENHGLYLADQYVKGIAKSRKSGS | 83 |
| | pCoV1B-05-PL | PrefLead-S2P.1154-del-Ferritin | 1,314 | SSQCVNLTTRTQLPPAYTNSFTRGVYYPDKVFRSSVLHSTQDLFLPFFSN V TWFHAIHVSGTNGTKRFDNPVLPFNDGVYFASTEKSNIIRGWIFGTTLDS K TQSLLIVNNATNVVIKVCEFQFCNDPFLGVYYHKNNKSWMESEFRVYSSA NNCTFEYVSQPFLMDLEGKQGNFKNLREFVFKNIDGYFKIYSKHTPINLV R DLPQGFSALEPLVDLPIGINITRFQTLLALHRSYLTPGDSSSGWTAGAAA Y YVGYLQPRTFLLKYNENGTITDAVDCALDPLSETKCTLKSFTVEKGIYQT S NFRVQPTESIVRFPNITNLCPFGEVFNATRFASVYAWNRKRISNCVADYS V LYNSASFSTFKCYGVSPTKLNDLCFTNVYADSFVIRGDEVRQIAPGQTGK I ADYNYKLPDDFTGCVIAWNSNNLDSKVGGNYNYLYRLFRKSNLKPFERD ISTEIYQAGSTPCNGVEGFNCYFPLQSYGFQPTNGVGYQPYRVVVLSFEL L HAPATVCGPKKSTNLVKNKCVNFNFNGLTGTGVLTESNKKFLPFQQFGR DIADTTDAVRDPQTLEILDITPCSFGGVSVITPGTNTSNQVAVLYQDVNC T EVPVAIHADQLTPTWRVYSTGSNVFQTRAGCLIGAEHVNNSYECDIPIGA GICASYQTQTNSPGSASSVASQSIIAYTMSLGAENSVAYSNNSIAIPTNF TIS VTTEILPVSMTKTSVDCTMYICGDSTECSNLLLQYGSFCTQLNRALTGIA V EQDKNTQEVFAQVKQIYKTPPIKDFGGFNFSQILPDPSKPSKRSFIEDLL FN KVTLADAGFIKQYGDCLGDIAARDLICAQKFNGLTVLPPLLTDEMIAQYT SALLAGTITSGWTFGAGAALQIPFAMQMAYRFNGIGVTQNVLYENQKLIA NQFNSAIGKIQDSLSSTASALGKLQDVVNQNAQALNTLVKQLSSNFGAIS S VLNDILSRLDPPEAEVQIDRLITGRLQSLQTYVTQQLIRAAEIRASANLA AT KMSECVLGQSKRVDFCGKGYHLMSFPQSAPHGVVFLHVTYVPAQEKNFT TAPAICHDGKAHFPREGVFVSNGTHWFVTQRNFYEPQIITTDNTFVSGNC DVVIGIVNNTVYDPLQPELDSFKEELDKGSGGSGDIIKLLNEQVNKEMQS S NLYMSMSSWCYTHSLDGAGLFLFDHAAEEYEHAKKLIIFLNENNVPVQL TSISAPEHKFEGLTQIFQKAYEHEQHISESINNIVDHAIKSKDHATFNFL QW YVAEQHEEEVLFKDILDKIELIGNENHGLYLADQYVKGIAKSRKSGS | 84 |
| | pCoV1B-06-PL | PrefLead-S2P.1158op1-del-Ferritin | 1,318 | SSQCVNLTTRTQLPPAYTNSFTRGVYYPDKVFRSSVLHSTQDLFLPFFSN V TWFHAIHVSGTNGTKRFDNPVLPFNDGVYFASTEKSNIIRGWIFGTTLDS K TQSLLIVNNATNVVIKVCEFQFCNDPFLGVYYHKNNKSWMESEFRVYSSA NNCTFEYVSQPFLMDLEGKQGNFKNLREFVFKNIDGYFKIYSKHTPINLV R DLPQGFSALEPLVDLPIGINITRFQTLLALHRSYLTPGDSSSGWTAGAAA Y YVGYLQPRTFLLKYNENGTITDAVDCALDPLSETKCTLKSFTVEKGIYQT S NFRVQPTESIVRFPNITNLCPFGEVFNATRFASVYAWNRKRISNCVADYS V LYNSASFSTFKCYGVSPTKLNDLCFTNVYADSFVIRGDEVRQIAPGQTGK I ADYNYKLPDDFTGCVIAWNSNNLDSKVGGNYNYLYRLFRKSNLKPFERD ISTEIYQAGSTPCNGVEGFNCYFPLQSYGFQPTNGVGYQPYRVVVLSFEL L HAPATVCGPKKSTNLVKNKCVNFNFNGLTGTGVLTESNKKFLPFQQFGR DIADTTDAVRDPQTLEILDITPCSFGGVSVITPGTNTSNQVAVLYQDVNC T EVPVAIHADQLTPTWRVYSTGSNVFQTRAGCLIGAEHVNNSYECDIPIGA GICASYQTQTNSPGSASSVASQSIIAYTMSLGAENSVAYSNNSIAIPTNF TIS VTTEILPVSMTKTSVDCTMYICGDSTECSNLLLQYGSFCTQLNRALTGIA V EQDKNTQEVFAQVKQIYKTPPIKDFGGFNFSQILPDPSKPSKRSFIEDLL FN KVTLADAGFIKQYGDCLGDIAARDLICAQKFNGLTVLPPLLTDEMIAQYT SALLAGTITSGWTFGAGAALQIPFAMQMAYRFNGIGVTQNVLYENQKLIA NQFNSAIGKIQDSLSSTASALGKLQDVVNQNAQALNTLVKQLSSNFGAIS S VLNDILSRLDPPEAEVQIDRLITGRLQSLQTYVTQQLIRAAEIRASANLA AT KMSECVLGQSKRVDFCGKGYHLMSFPQSAPHGVVFLHVTYVPAQEKNFT TAPAICHDGKAHFPREGVFVSNGTHWFVTQRNFYEPQIITTDNTFVSGNC DVVIGIVNNTVYDPLQSELDSIKEELDKIHKNGSGGSGDIIKLLNEQVNK E MQSSNLYMSMSSWCYTHSLDGAGLFLFDHAAEEYEHAKKLIIFLNENNV PVQLTSISAPEHKFEGLTQIFQKAYEHEQHISESINNIVDHAIKSKDHAT FNF LQWYVAEQHEEEVLFKDILDKIELIGNENHGLYLADQYVKGIAKSRKSGS | 85 |
| | pCoV1B-07-PL | PrefLead-S2P.1158op2-del-Ferritin | 1,318 | SSQCVNLTTRTQLPPAYTNSFTRGVYYPDKVFRSSVLHSTQDLFLPFFSN V TWFHAIHVSGTNGTKRFDNPVLPFNDGVYFASTEKSNIIRGWIFGTTLDS K TQSLLIVNNATNVVIKVCEFQFCNDPFLGVYYHKNNKSWMESEFRVYSSA NNCTFEYVSQPFLMDLEGKQGNFKNLREFVFKNIDGYFKIYSKHTPINLV R DLPQGFSALEPLVDLPIGINITRFQTLLALHRSYLTPGDSSSGWTAGAAA Y YVGYLQPRTFLLKYNENGTITDAVDCALDPLSETKCTLKSFTVEKGIYQT S NFRVQPTESIVRFPNITNLCPFGEVFNATRFASVYAWNRKRISNCVADYS V LYNSASFSTFKCYGVSPTKLNDLCFTNVYADSFVIRGDEVRQIAPGQTGK I ADYNYKLPDDFTGCVIAWNSNNLDSKVGGNYNYLYRLFRKSNLKPFERD ISTEIYQAGSTPCNGVEGFNCYFPLQSYGFQPTNGVGYQPYRVVVLSFEL L HAPATVCGPKKSTNLVKNKCVNFNFNGLTGTGVLTESNKKFLPFQQFGR DIADTTDAVRDPQTLEILDITPCSFGGVSVITPGTNTSNQVAVLYQDVNC T EVPVAIHADQLTPTWRVYSTGSNVFQTRAGCLIGAEHVNNSYECDIPIGA GICASYQTQTNSPGSASSVASQSIIAYTMSLGAENSVAYSNNSIAIPTNF TIS VTTEILPVSMTKTSVDCTMYICGDSTECSNLLLQYGSFCTQLNRALTGIA V EQDKNTQEVFAQVKQIYKTPPIKDFGGFNFSQILPDPSKPSKRSFIEDLL FN KVTLADAGFIKQYGDCLGDIAARDLICAQKFNGLTVLPPLLTDEMIAQYT SALLAGTITSGWTFGAGAALQIPFAMQMAYRFNGIGVTQNVLYENQKLIA NQFNSAIGKIQDSLSSTASALGKLQDVVNQNAQALNTLVKQLSSNFGAIS S VLNDILSRLDPPEAEVQIDRLITGRLQSLQTYVTQQLIRAAEIRASANLA AT KMSECVLGQSKRVDFCGKGYHLMSFPQSAPHGVVFLHVTYVPAQEKNFT TAPAICHDGKAHFPREGVFVSNGTHWFVTQRNFYEPQIITTDNTFVSGNC DVVIGIVNNTVYDPLQSEIDSIKEEIDKIHKNGSGGSGDIIKLLNEQVNK EM QSSNLYMSMSSWCYTHSLDGAGLFLFDHAAEEYEHAKKLIIFLNENNVPV QLTSISAPEHKFEGLTQIFQKAYEHEQHISESINNIVDHAIKSKDHATFN FL QWYVAEQHEEEVLFKDILDKIELIGNENHGLYLADQYVKGIAKSRKSGS | 86 |
| | pCoV1B-08-PL | PrefLead-S2P.1158op1x 2-del-Ferritin | 1,332 | SSQCVNLTTRTQLPPAYTNSFTRGVYYPDKVFRSSVLHSTQDLFLPFFSN V TWFHAIHVSGTNGTKRFDNPVLPFNDGVYFASTEKSNIIRGWIFGTTLDS K TQSLLIVNNATNVVIKVCEFQFCNDPFLGVYYHKNNKSWMESEFRVYSSA NNCTFEYVSQPFLMDLEGKQGNFKNLREFVFKNIDGYFKIYSKHTPINLV R DLPQGFSALEPLVDLPIGINITRFQTLLALHRSYLTPGDSSSGWTAGAAA Y YVGYLQPRTFLLKYNENGTITDAVDCALDPLSETKCTLKSFTVEKGIYQT S NFRVQPTESIVRFPNITNLCPFGEVFNATRFASVYAWNRKRISNCVADYS V LYNSASFSTFKCYGVSPTKLNDLCFTNVYADSFVIRGDEVRQIAPGQTGK I ADYNYKLPDDFTGCVIAWNSNNLDSKVGGNYNYLYRLFRKSNLKPFERD ISTEIYQAGSTPCNGVEGFNCYFPLQSYGFQPTNGVGYQPYRVVVLSFEL L HAPATVCGPKKSTNLVKNKCVNFNFNGLTGTGVLTESNKKFLPFQQFGR DIADTTDAVRDPQTLEILDITPCSFGGVSVITPGTNTSNQVAVLYQDVNC T EVPVAIHADQLTPTWRVYSTGSNVFQTRAGCLIGAEHVNNSYECDIPIGA GICASYQTQTNSPGSASSVASQSIIAYTMSLGAENSVAYSNNSIAIPTNF TIS VTTEILPVSMTKTSVDCTMYICGDSTECSNLLLQYGSFCTQLNRALTGIA V EQDKNTQEVFAQVKQIYKTPPIKDFGGFNFSQILPDPSKPSKRSFIEDLL FN KVTLADAGFIKQYGDCLGDIAARDLICAQKFNGLTVLPPLLTDEMIAQYT SALLAGTITSGWTFGAGAALQIPFAMQMAYRFNGIGVTQNVLYENQKLIA NQFNSAIGKIQDSLSSTASALGKLQDVVNQNAQALNTLVKQLSSNFGAIS S VLNDILSRLDPPEAEVQIDRLITGRLQSLQTYVTQQLIRAAEIRASANLA AT KMSECVLGQSKRVDFCGKGYHLMSFPQSAPHGVVFLHVTYVPAQEKNFT TAPAICHDGKAHFPREGVFVSNGTHWFVTQRNFYEPQIITTDNTFVSGNC DVVIGIVNNTVYDPLQSELDSIKEELDKIHKNLDSIKEELDKIHKNGSGG SG DIIKLLNEQVNKEMQSSNLYMSMSSWCYTHSLDGAGLFLFDHAAEEYEH AKKLIIFLNENNVPVQLTSISAPEHKFEGLTQIFQKAYEHEQHISESINN IVD HAIKSKDHATFNFLQWYVAEQHEEEVLFKDILDKIELIGNENHGLYLADQ YVKGIAKSRKSGS | 87 |
| | pCoV1B-09-PL | PrefLead-S2P.1158op2x 2-del-Ferritin | 1,332 | SSQCVNLTTRTQLPPAYTNSFTRGVYYPDKVFRSSVLHSTQDLFLPFFSN V TWFHAIHVSGTNGTKRFDNPVLPFNDGVYFASTEKSNIIRGWIFGTTLDS K TQSLLIVNNATNVVIKVCEFQFCNDPFLGVYYHKNNKSWMESEFRVYSSA NNCTFEYVSQPFLMDLEGKQGNFKNLREFVFKNIDGYFKIYSKHTPINLV R DLPQGFSALEPLVDLPIGINITRFQTLLALHRSYLTPGDSSSGWTAGAAA Y YVGYLQPRTFLLKYNENGTITDAVDCALDPLSETKCTLKSFTVEKGIYQT S NFRVQPTESIVRFPNITNLCPFGEVFNATRFASVYAWNRKRISNCVADYS V LYNSASFSTFKCYGVSPTKLNDLCFTNVYADSFVIRGDEVRQIAPGQTGK I ADYNYKLPDDFTGCVIAWNSNNLDSKVGGNYNYLYRLFRKSNLKPFERD ISTEIYQAGSTPCNGVEGFNCYFPLQSYGFQPTNGVGYQPYRVVVLSFEL L HAPATVCGPKKSTNLVKNKCVNFNFNGLTGTGVLTESNKKFLPFQQFGR DIADTTDAVRDPQTLEILDITPCSFGGVSVITPGTNTSNQVAVLYQDVNC T EVPVAIHADQLTPTWRVYSTGSNVFQTRAGCLIGAEHVNNSYECDIPIGA GICASYQTQTNSPGSASSVASQSIIAYTMSLGAENSVAYSNNSIAIPTNF TIS VTTEILPVSMTKTSVDCTMYICGDSTECSNLLLQYGSFCTQLNRALTGIA V EQDKNTQEVFAQVKQIYKTPPIKDFGGFNFSQILPDPSKPSKRSFIEDLL FN KVTLADAGFIKQYGDCLGDIAARDLICAQKFNGLTVLPPLLTDEMIAQYT SALLAGTITSGWTFGAGAALQIPFAMQMAYRFNGIGVTQNVLYENQKLIA NQFNSAIGKIQDSLSSTASALGKLQDVVNQNAQALNTLVKQLSSNFGAIS S VLNDILSRLDPPEAEVQIDRLITGRLQSLQTYVTQQLIRAAEIRASANLA AT KMSECVLGQSKRVDFCGKGYHLMSFPQSAPHGVVFLHVTYVPAQEKNFT TAPAICHDGKAHFPREGVFVSNGTHWFVTQRNFYEPQIITTDNTFVSGNC DVVIGIVNNTVYDPLQSEIDSIKEEIDKIHKNIDSIKEEIDKIHKNGSGG SGDI IKLLNEQVNKEMQSSNLYMSMSSWCYTHSLDGAGLFLFDHAAEEYEHAK KLIIFLNENNVPVQLTSISAPEHKFEGLTQIFQKAYEHEQHISESINNIV DHAI KSKDHATFNFLQWYVAEQHEEEVLFKDILDKIELIGNENHGLYLADQYVK GIAKSRKSGS | 88 |
| | pCoV1B-10-PL | PrefLead-S2P.1158op1-fGCN4-del-Ferritin | 1,349 | SSQCVNLTTRTQLPPAYTNSFTRGVYYPDKVFRSSVLHSTQDLFLPFFSN V TWFHAIHVSGTNGTKRFDNPVLPFNDGVYFASTEKSNIIRGWIFGTTLDS K TQSLLIVNNATNVVIKVCEFQFCNDPFLGVYYHKNNKSWMESEFRVYSSA NNCTFEYVSQPFLMDLEGKQGNFKNLREFVFKNIDGYFKIYSKHTPINLV R DLPQGFSALEPLVDLPIGINITRFQTLLALHRSYLTPGDSSSGWTAGAAA Y YVGYLQPRTFLLKYNENGTITDAVDCALDPLSETKCTLKSFTVEKGIYQT S NFRVQPTESIVRFPNITNLCPFGEVFNATRFASVYAWNRKRISNCVADYS V LYNSASFSTFKCYGVSPTKLNDLCFTNVYADSFVIRGDEVRQIAPGQTGK I ADYNYKLPDDFTGCVIAWNSNNLDSKVGGNYNYLYRLFRKSNLKPFERD ISTEIYQAGSTPCNGVEGFNCYFPLQSYGFQPTNGVGYQPYRVVVLSFEL L HAPATVCGPKKSTNLVKNKCVNFNFNGLTGTGVLTESNKKFLPFQQFGR DIADTTDAVRDPQTLEILDITPCSFGGVSVITPGTNTSNQVAVLYQDVNC T EVPVAIHADQLTPTWRVYSTGSNVFQTRAGCLIGAEHVNNSYECDIPIGA GICASYQTQTNSPGSASSVASQSIIAYTMSLGAENSVAYSNNSIAIPTNF TIS VTTEILPVSMTKTSVDCTMYICGDSTECSNLLLQYGSFCTQLNRALTGIA V EQDKNTQEVFAQVKQIYKTPPIKDFGGFNFSQILPDPSKPSKRSFIEDLL FN KVTLADAGFIKQYGDCLGDIAARDLICAQKFNGLTVLPPLLTDEMIAQYT SALLAGTITSGWTFGAGAALQIPFAMQMAYRFNGIGVTQNVLYENQKLIA NQFNSAIGKIQDSLSSTASALGKLQDVVNQNAQALNTLVKQLSSNFGAIS S VLNDILSRLDPPEAEVQIDRLITGRLQSLQTYVTQQLIRAAEIRASANLA AT KMSECVLGQSKRVDFCGKGYHLMSFPQSAPHGVVFLHVTYVPAQEKNFT TAPAICHDGKAHFPREGVFVSNGTHWFVTQRNFYEPQIITTDNTFVSGNC DVVIGIVNNTVYDPLQSELDSIKEELDKIHKNMKQIEDKIEEILSKIYHI ENE IARIKKLIGRGSGGSGDIIKLLNEQVNKEMQSSNLYMSMSSWCYTHSLDG AGLFLFDHAAEEYEHAKKLIIFLNENNVPVQLTSISAPEHKFEGLTQIFQ KA YEHEQHISESINNIVDHAIKSKDHATFNFLQWYVAEQHEEEVLFKDILDK I ELIGNENHGLYLADQYVKGIAKSRKSGS | 89 |
| | pCoV89 | His8-3c NTD-SSQC-Ferrritin-301CTLKSFT 307 | 495 | HHHHHHHHGPLEVLFQGPSSQCVNLTTRTQLPPAYTNSFTRGVYYPDKVF RSSVLHSTQDLFLPFFSNVTWFHAIHVSGTNGTKRFDNPVLPFNDGVYFA S TEKSNIIRGWIFGTTLDSKTQSLLIVNNATNVVIKVCEFQFCNDPFLGVY Y HKNNKSWMESEFRVYSSANNCTFEYVSQPFLMDLEGKQGNFKNLREFVF KNIDGYFKIYSKHTPINLVRDLPQGFSALEPLVDLPIGINITRFQTLLAL HRS YLTPGDSSSGWTAGAAAYYVGYLQPRTFLLKYNENGTITDAVDCALDPL SETKCTLKSFTGSGGGGESQVRQQFSKDIEKLLNEQVNKEMQSSNLYMS MSSWCYTHSLDGAGLFLFDHAAEEYEHAKKLIIFLNENNVPVQLTSISAP E HKFEGLTQIFQKAYEHEQHISESINNIVDHAIKSKDHATFNFLQWYVAEQ H EEEVLFKDILDKIELIGNENHGLYLADQYVKGIAKSRKSGS | 90 |
| | pCoV90 | His8-3c NTD-SSQC-Ferrritin-L296K-L303D | 491 | HHHHHHHHGPLEVLFQGPSSQCVNLTTRTQLPPAYTNSFTRGVYYPDKVF RSSVLHSTQDLFLPFFSNVTWFHAIHVSGTNGTKRFDNPVLPFNDGVYFA S TEKSNIIRGWIFGTTLDSKTQSLLIVNNATNVVIKVCEFQFCNDPFLGVY Y HKNNKSWMESEFRVYSSANNCTFEYVSQPFLMDLEGKQGNFKNLREFVF KNIDGYFKIYSKHTPINLVRDLPQGFSALEPLVDLPIGINITRFQTLLAL HRS YLTPGDSSSGWTAGAAAYYVGYLQPRTFLLKYNENGTITDAVDCALDPK SETKCTDGSGGGGESQVRQQFSKDIEKLLNEQVNKEMQSSNLYMSMSSW CYTHSLDGAGLFLFDHAAEEYEHAKKLIIFLNENNVPVQLTSISAPEHKF E GLTQIFQKAYEHEQHISESINNIVDHAIKSKDHATFNFLQWYVAEQHEEE V LFKDILDKIELIGNENHGLYLADQYVKGIAKSRKSGS | 91 |
| | pCoV91 | His8-3c NTD-SSQC-Ferrritin-301CTLKSFT 307-L296K-L303D | 495 | HHHHHHHHGPLEVLFQGPSSQCVNLTTRTQLPPAYTNSFTRGVYYPDKVF RSSVLHSTQDLFLPFFSNVTWFHAIHVSGTNGTKRFDNPVLPFNDGVYFA S TEKSNIIRGWIFGTTLDSKTQSLLIVNNATNVVIKVCEFQFCNDPFLGVY Y HKNNKSWMESEFRVYSSANNCTFEYVSQPFLMDLEGKQGNFKNLREFVF KNIDGYFKIYSKHTPINLVRDLPQGFSALEPLVDLPIGINITRFQTLLAL HRS YLTPGDSSSGWTAGAAAYYVGYLQPRTFLLKYNENGTITDAVDCALDPK SETKCTDKSFTGSGGGGESQVRQQFSKDIEKLLNEQVNKEMQSSNLYMS MSSWCYTHSLDGAGLFLFDHAAEEYEHAKKLIIFLNENNVPVQLTSISAP E HKFEGLTQIFQKAYEHEQHISESINNIVDHAIKSKDHATFNFLQWYVAEQ H EEEVLFKDILDKIELIGNENHGLYLADQYVKGIAKSRKSGS | 92 |
| | pCoV92 | His8-3c NTD-SSQC-Ferrritin-291 CALDP to CGNDT | 491 | HHHHHHHHGPLEVLFQGPSSQCVNLTTRTQLPPAYTNSFTRGVYYPDKVF RSSVLHSTQDLFLPFFSNVTWFHAIHVSGTNGTKRFDNPVLPFNDGVYFA S TEKSNIIRGWIFGTTLDSKTQSLLIVNNATNVVIKVCEFQFCNDPFLGVY Y HKNNKSWMESEFRVYSSANNCTFEYVSQPFLMDLEGKQGNFKNLREFVF KNIDGYFKIYSKHTPINLVRDLPQGFSALEPLVDLPIGINITRFQTLLAL HRS YLTPGDSSSGWTAGAAAYYVGYLQPRTFLLKYNENGTITDAVDCGNDTL SETKCTLGSGGGGESQVRQQFSKDIEKLLNEQVNKEMQSSNLYMSMSSW CYTHSLDGAGLFLFDHAAEEYEHAKKLIIFLNENNVPVQLTSISAPEHKF E GLTQIFQKAYEHEQHISESINNIVDHAIKSKDHATFNFLQWYVAEQHEEE V LFKDILDKIELIGNENHGLYLADQYVKGIAKSRKSGS | 93 |
| | pCoV93 | His8-3c NTD-SSQC-Ferrritin-F59T | 491 | HHHHHHHHGPLEVLFQGPSSQCVNLTTRTQLPPAYTNSFTRGVYYPDKVF RSSVLHSTQDLFLPFTSNVTWFHAIHVSGTNGTKRFDNPVLPFNDGVYFA STEKSNIIRGWIFGTTLDSKTQSLLIVNNATNVVIKVCEFQFCNDPFLGV YY HKNNKSWMESEFRVYSSANNCTFEYVSQPFLMDLEGKQGNFKNLREFVF KNIDGYFKIYSKHTPINLVRDLPQGFSALEPLVDLPIGINITRFQTLLAL HRS YLTPGDSSSGWTAGAAAYYVGYLQPRTFLLKYNENGTITDAVDCALDPL SETKCTLGSGGGGESQVRQQFSKDIEKLLNEQVNKEMQSSNLYMSMSSW CYTHSLDGAGLFLFDHAAEEYEHAKKLIIFLNENNVPVQLTSISAPEHKF E GLTQIFQKAYEHEQHISESINNIVDHAIKSKDHATFNFLQWYVAEQHEEE V LFKDILDKIELIGNENHGLYLADQYVKGIAKSRKSGS | 94 |
| | pCoV94 | His8-3c NTD-SSQC-Ferrritin-Y28T | 491 | HHHHHHHHGPLEVLFQGPSSQCVNLTTRTQLPPATTNSFTRGVYYPDKVF RSSVLHSTQDLFLPFFSNVTWFHAIHVSGTNGTKRFDNPVLPFNDGVYFA S TEKSNIIRGWIFGTTLDSKTQSLLIVNNATNVVIKVCEFQFCNDPFLGVY Y HKNNKSWMESEFRVYSSANNCTFEYVSQPFLMDLEGKQGNFKNLREFVF KNIDGYFKIYSKHTPINLVRDLPQGFSALEPLVDLPIGINITRFQTLLAL HRS YLTPGDSSSGWTAGAAAYYVGYLQPRTFLLKYNENGTITDAVDCALDPL SETKCTLGSGGGGESQVRQQFSKDIEKLLNEQVNKEMQSSNLYMSMSSW CYTHSLDGAGLFLFDHAAEEYEHAKKLIIFLNENNVPVQLTSISAPEHKF E GLTQIFQKAYEHEQHISESINNIVDHAIKSKDHATFNFLQWYVAEQHEEE V LFKDILDKIELIGNENHGLYLADQYVKGIAKSRKSGS | 95 |
| | pCoV95 | His8-3c NTD-SSQC-Ferrritin-Y200A | 491 | HHHHHHHHGPLEVLFQGPSSQCVNLTTRTQLPPAYTNSFTRGVYYPDKVF RSSVLHSTQDLFLPFFSNVTWFHAIHVSGTNGTKRFDNPVLPFNDGVYFA S TEKSNIIRGWIFGTTLDSKTQSLLIVNNATNVVIKVCEFQFCNDPFLGVY Y HKNNKSWMESEFRVYSSANNCTFEYVSQPFLMDLEGKQGNFKNLREFVF KNIDGAFKIYSKHTPINLVRDLPQGFSALEPLVDLPIGINITRFQTLLAL HRS YLTPGDSSSGWTAGAAAYYVGYLQPRTFLLKYNENGTITDAVDCALDPL SETKCTLGSGGGGESQVRQQFSKDIEKLLNEQVNKEMQSSNLYMSMSSW CYTHSLDGAGLFLFDHAAEEYEHAKKLIIFLNENNVPVQLTSISAPEHKF E GLTQIFQKAYEHEQHISESINNIVDHAIKSKDHATFNFLQWYVAEQHEEE V LFKDILDKIELIGNENHGLYLADQYVKGIAKSRKSGS | 96 |
| | pCoV96 | His8-3c NTD-SSQC-Ferrritin-Y200N-K202T | 491 | HHHHHHHHGPLEVLFQGPSSQCVNLTTRTQLPPAYTNSFTRGVYYPDKVF RSSVLHSTQDLFLPFFSNVTWFHAIHVSGTNGTKRFDNPVLPFNDGVYFA S TEKSNIIRGWIFGTTLDSKTQSLLIVNNATNVVIKVCEFQFCNDPFLGVY Y HKNNKSWMESEFRVYSSANNCTFEYVSQPFLMDLEGKQGNFKNLREFVF KNIDGNFTIYSKHTPINLVRDLPQGFSALEPLVDLPIGINITRFQTLLAL HRS YLTPGDSSSGWTAGAAAYYVGYLQPRTFLLKYNENGTITDAVDCALDPL SETKCTLGSGGGGESQVRQQFSKDIEKLLNEQVNKEMQSSNLYMSMSSW CYTHSLDGAGLFLFDHAAEEYEHAKKLIIFLNENNVPVQLTSISAPEHKF E GLTQIFQKAYEHEQHISESINNIVDHAIKSKDHATFNFLQWYVAEQHEEE V LFKDILDKIELIGNENHGLYLADQYVKGIAKSRKSGS | 97 |
| | pCoV97 | His8-3c NTD-SSQC-Ferrritin-Y38T | 491 | HHHHHHHHGPLEVLFQGPSSQCVNLTTRTQLPPAYTNSFTRGVYTPDKVF RSSVLHSTQDLFLPFFSNVTWFHAIHVSGTNGTKRFDNPVLPFNDGVYFA S TEKSNIIRGWIFGTTLDSKTQSLLIVNNATNVVIKVCEFQFCNDPFLGVY Y HKNNKSWMESEFRVYSSANNCTFEYVSQPFLMDLEGKQGNFKNLREFVF KNIDGYFKIYSKHTPINLVRDLPQGFSALEPLVDLPIGINITRFQTLLAL HRS YLTPGDSSSGWTAGAAAYYVGYLQPRTFLLKYNENGTITDAVDCALDPL SETKCTLGSGGGGESQVRQQFSKDIEKLLNEQVNKEMQSSNLYMSMSSW CYTHSLDGAGLFLFDHAAEEYEHAKKLIIFLNENNVPVQLTSISAPEHKF E GLTQIFQKAYEHEQHISESINNIVDHAIKSKDHATFNFLQWYVAEQHEEE V LFKDILDKIELIGNENHGLYLADQYVKGIAKSRKSGS | 98 |
| | pCoV98 | His8-3c NTD-SSQC-Ferrritin-V42T-F43A-V47T | 491 | HHHHHHHHGPLEVLFQGPSSQCVNLTTRTQLPPAYTNSFTRGVYYPDKT ARSSTLHSTQDLFLPFFSNVTWFHAIHVSGTNGTKRFDNPVLPFNDGVYF ASTEKSNIIRGWIFGTTLDSKTQSLLIVNNATNVVIKVCEFQFCNDPFLG VY YHKNNKSWMESEFRVYSSANNCTFEYVSQPFLMDLEGKQGNFKNLREFV FKNIDGYFKIYSKHTPINLVRDLPQGFSALEPLVDLPIGINITRFQTLLA LHR SYLTPGDSSSGWTAGAAAYYVGYLQPRTFLLKYNENGTITDAVDCALDP LSETKCTLGSGGGGESQVRQQFSKDIEKLLNEQVNKEMQSSNLYMSMSS WCYTHSLDGAGLFLFDHAAEEYEHAKKLIIFLNENNVPVQLTSISAPEHK F EGLTQIFQKAYEHEQHISESINNIVDHAIKSKDHATFNFLQWYVAEQHEE E VLFKDILDKIELIGNENHGLYLADQYVKGIAKSRKSGS | 99 |
| | pCoV99 | His8-3c NTD-SSQC-Ferrritin-118LIV to NIT | 491 | HHHHHHHHGPLEVLFQGPSSQCVNLTTRTQLPPAYTNSFTRGVYYPDKVF RSSVLHSTQDLFLPFFSNVTWFHAIHVSGTNGTKRFDNPVLPFNDGVYFA S TEKSNIIRGWIFGTTLDSKTQSLNITNNATNVVIKVCEFQFCNDPFLGVY Y HKNNKSWMESEFRVYSSANNCTFEYVSQPFLMDLEGKQGNFKNLREFVF KNIDGYFKIYSKHTPINLVRDLPQGFSALEPLVDLPIGINITRFQTLLAL HRS YLTPGDSSSGWTAGAAAYYVGYLQPRTFLLKYNENGTITDAVDCALDPL SETKCTLGSGGGGESQVRQQFSKDIEKLLNEQVNKEMQSSNLYMSMSSW CYTHSLDGAGLFLFDHAAEEYEHAKKLIIFLNENNVPVQLTSISAPEHKF E GLTQIFQKAYEHEQHISESINNIVDHAIKSKDHATFNFLQWYVAEQHEEE V LFKDILDKIELIGNENHGLYLADQYVKGIAKSRKSGS | 100 |
| | pCoV100 | His8-3c NTD-SSQC-Ferrritin-133FQF to NQT-I105F | 491 | HHHHHHHHGPLEVLFQGPSSQCVNLTTRTQLPPAYTNSFTRGVYYPDKVF RSSVLHSTQDLFLPFFSNVTWFHAIHVSGTNGTKRFDNPVLPFNDGVYFA S TEKSNIIRGWFFGTTLDSKTQSLLIVNNATNVVIKVCENQTCNDPFLGVY Y HKNNKSWMESEFRVYSSANNCTFEYVSQPFLMDLEGKQGNFKNLREFVF KNIDGYFKIYSKHTPINLVRDLPQGFSALEPLVDLPIGINITRFQTLLAL HRS YLTPGDSSSGWTAGAAAYYVGYLQPRTFLLKYNENGTITDAVDCALDPL SETKCTLGSGGGGESQVRQQFSKDIEKLLNEQVNKEMQSSNLYMSMSSW CYTHSLDGAGLFLFDHAAEEYEHAKKLIIFLNENNVPVQLTSISAPEHKF E GLTQIFQKAYEHEQHISESINNIVDHAIKSKDHATFNFLQWYVAEQHEEE V LFKDILDKIELIGNENHGLYLADQYVKGIAKSRKSGS | 101 |
| | pCoV101 | His8-3c NTD-SSQC-Ferrritin-126VVI to NVT | 491 | HHHHHHHHGPLEVLFQGPSSQCVNLTTRTQLPPAYTNSFTRGVYYPDKVF RSSVLHSTQDLFLPFFSNVTWFHAIHVSGTNGTKRFDNPVLPFNDGVYFA S TEKSNIIRGWIFGTTLDSKTQSLLIVNNATNNVTKVCEFQFCNDPFLGVY Y HKNNKSWMESEFRVYSSANNCTFEYVSQPFLMDLEGKQGNFKNLREFVF KNIDGYFKIYSKHTPINLVRDLPQGFSALEPLVDLPIGINITRFQTLLAL HRS YLTPGDSSSGWTAGAAAYYVGYLQPRTFLLKYNENGTITDAVDCALDPL SETKCTLGSGGGGESQVRQQFSKDIEKLLNEQVNKEMQSSNLYMSMSSW CYTHSLDGAGLFLFDHAAEEYEHAKKLIIFLNENNVPVQLTSISAPEHKF E GLTQIFQKAYEHEQHISESINNIVDHAIKSKDHATFNFLQWYVAEQHEEE V LFKDILDKIELIGNENHGLYLADQYVKGIAKSRKSGS | 102 |
| | pCoV102 | His8-3c NTD-SSQC-Ferrritin-226LVD to NVT | 491 | HHHHHHHHGPLEVLFQGPSSQCVNLTTRTQLPPAYTNSFTRGVYYPDKVF RSSVLHSTQDLFLPFFSNVTWFHAIHVSGTNGTKRFDNPVLPFNDGVYFA S TEKSNIIRGWIFGTTLDSKTQSLLIVNNATNVVIKVCEFQFCNDPFLGVY Y HKNNKSWMESEFRVYSSANNCTFEYVSQPFLMDLEGKQGNFKNLREFVF KNIDGYFKIYSKHTPINLVRDLPQGFSALEPNVTLPIGINITRFQTLLAL HRS YLTPGDSSSGWTAGAAAYYVGYLQPRTFLLKYNENGTITDAVDCALDPL SETKCTLGSGGGGESQVRQQFSKDIEKLLNEQVNKEMQSSNLYMSMSSW CYTHSLDGAGLFLFDHAAEEYEHAKKLIIFLNENNVPVQLTSISAPEHKF E GLTQIFQKAYEHEQHISESINNIVDHAIKSKDHATFNFLQWYVAEQHEEE V LFKDILDKIELIGNENHGLYLADQYVKGIAKSRKSGS | 103 |
| | pCoV103 | His8-3c NTD-SSQC-Ferrritin-227VDL to NDT | 491 | HHHHHHHHGPLEVLFQGPSSQCVNLTTRTQLPPAYTNSFTRGVYYPDKVF RSSVLHSTQDLFLPFFSNVTWFHAIHVSGTNGTKRFDNPVLPFNDGVYFA S TEKSNIIRGWIFGTTLDSKTQSLLIVNNATNVVIKVCEFQFCNDPFLGVY Y HKNNKSWMESEFRVYSSANNCTFEYVSQPFLMDLEGKQGNFKNLREFVF KNIDGYFKIYSKHTPINLVRDLPQGFSALEPLNDTPIGINITRFQTLLAL HRS YLTPGDSSSGWTAGAAAYYVGYLQPRTFLLKYNENGTITDAVDCALDPL SETKCTLGSGGGGESQVRQQFSKDIEKLLNEQVNKEMQSSNLYMSMSSW CYTHSLDGAGLFLFDHAAEEYEHAKKLIIFLNENNVPVQLTSISAPEHKF E GLTQIFQKAYEHEQHISESINNIVDHAIKSKDHATFNFLQWYVAEQHEEE V LFKDILDKIELIGNENHGLYLADQYVKGIAKSRKSGS | 104 |
| | pCoV107 | S1-SSQC-endH655-Ferritin | 825 | SSQCVNLTTRTQLPPAYTNSFTRGVYYPDKVFRSSVLHSTQDLFLPFFSN V TWFHAIHVSGTNGTKRFDNPVLPFNDGVYFASTEKSNIIRGWIFGTTLDS K TQSLLIVNNATNVVIKVCEFQFCNDPFLGVYYHKNNKSWMESEFRVYSSA NNCTFEYVSQPFLMDLEGKQGNFKNLREFVFKNIDGYFKIYSKHTPINLV R DLPQGFSALEPLVDLPIGINITRFQTLLALHRSYLTPGDSSSGWTAGAAA Y YVGYLQPRTFLLKYNENGTITDAVDCALDPLSETKCTLKSFTVEKGIYQT S NFRVQPTESIVRFPNITNLCPFGEVFNATRFASVYAWNRKRISNCVADYS V LYNSASFSTFKCYGVSPTKLNDLCFTNVYADSFVIRGDEVRQIAPGQTGK I ADYNYKLPDDFTGCVIAWNSNNLDSKVGGNYNYLYRLFRKSNLKPFERD ISTEIYQAGSTPCNGVEGFNCYFPLQSYGFQPTNGVGYQPYRVVVLSFEL L HAPATVCGPKKSTNLVKNKCVNFNFNGLTGTGVLTESNKKFLPFQQFGR DIADTTDAVRDPQTLEILDITPCSFGGVSVITPGTNTSNQVAVLYQDVNC T EVPVAIHADQLTPTWRVYSTGSNVFQTRAGCLIGAEHGSGGGGESQVRQ QFSKDIEKLLNEQVNKEMQSSNLYMSMSSWCYTHSLDGAGLFLFDHAAE EYEHAKKLIIFLNENNVPVQLTSISAPEHKFEGLTQIFQKAYEHEQHISE SIN NIVDHAIKSKDHATFNFLQWYVAEQHEEEVLFKDILDKIELIGNENHGLY L ADQYVKGIAKSRKSGS | 105 |
| | pCoV108 | S1-SSQC-endH655-611LYQ to NYT-Ferritin | 825 | SSQCVNLTTRTQLPPAYTNSFTRGVYYPDKVFRSSVLHSTQDLFLPFFSN V TWFHAIHVSGTNGTKRFDNPVLPFNDGVYFASTEKSNIIRGWIFGTTLDS K TQSLLIVNNATNVVIKVCEFQFCNDPFLGVYYHKNNKSWMESEFRVYSSA NNCTFEYVSQPFLMDLEGKQGNFKNLREFVFKNIDGYFKIYSKHTPINLV R DLPQGFSALEPLVDLPIGINITRFQTLLALHRSYLTPGDSSSGWTAGAAA Y YVGYLQPRTFLLKYNENGTITDAVDCALDPLSETKCTLKSFTVEKGIYQT S NFRVQPTESIVRFPNITNLCPFGEVFNATRFASVYAWNRKRISNCVADYS V LYNSASFSTFKCYGVSPTKLNDLCFTNVYADSFVIRGDEVRQIAPGQTGK I ADYNYKLPDDFTGCVIAWNSNNLDSKVGGNYNYLYRLFRKSNLKPFERD ISTEIYQAGSTPCNGVEGFNCYFPLQSYGFQPTNGVGYQPYRVVVLSFEL L HAPATVCGPKKSTNLVKNKCVNFNFNGLTGTGVLTESNKKFLPFQQFGR DIADTTDAVRDPQTLEILDITPCSFGGVSVITPGTNTSNQVAVNYTDVNC T EVPVAIHADQLTPTWRVYSTGSNVFQTRAGCLIGAEHGSGGGGESQVRQ QFSKDIEKLLNEQVNKEMQSSNLYMSMSSWCYTHSLDGAGLFLFDHAAE EYEHAKKLIIFLNENNVPVQLTSISAPEHKFEGLTQIFQKAYEHEQHISE SIN NIVDHAIKSKDHATFNFLQWYVAEQHEEEVLFKDILDKIELIGNENHGLY L ADQYVKGIAKSRKSGS | 106 |
| | pCoV109 | S1-SSQC-endT696-Ferritin | 866 | SSQCVNLTTRTQLPPAYTNSFTRGVYYPDKVFRSSVLHSTQDLFLPFFSN V TWFHAIHVSGTNGTKRFDNPVLPFNDGVYFASTEKSNIIRGWIFGTTLDS K TQSLLIVNNATNVVIKVCEFQFCNDPFLGVYYHKNNKSWMESEFRVYSSA NNCTFEYVSQPFLMDLEGKQGNFKNLREFVFKNIDGYFKIYSKHTPINLV R DLPQGFSALEPLVDLPIGINITRFQTLLALHRSYLTPGDSSSGWTAGAAA Y YVGYLQPRTFLLKYNENGTITDAVDCALDPLSETKCTLKSFTVEKGIYQT S NFRVQPTESIVRFPNITNLCPFGEVFNATRFASVYAWNRKRISNCVADYS V LYNSASFSTFKCYGVSPTKLNDLCFTNVYADSFVIRGDEVRQIAPGQTGK I ADYNYKLPDDFTGCVIAWNSNNLDSKVGGNYNYLYRLFRKSNLKPFERD ISTEIYQAGSTPCNGVEGFNCYFPLQSYGFQPTNGVGYQPYRVVVLSFEL L HAPATVCGPKKSTNLVKNKCVNFNFNGLTGTGVLTESNKKFLPFQQFGR DIADTTDAVRDPQTLEILDITPCSFGGVSVITPGTNTSNQVAVLYQDVNC T EVPVAIHADQLTPTWRVYSTGSNVFQTRAGCLIGAEHVNNSYECDIPIGA GICASYQTQTNSPGSASSVASQSIIAYTGSGGGGESQVRQQFSKDIEKLL NE QVNKEMQSSNLYMSMSSWCYTHSLDGAGLFLFDHAAEEYEHAKKLIIFL NENNVPVQLTSISAPEHKFEGLTQIFQKAYEHEQHISESINNIVDHAIKS KD HATFNFLQWYVAEQHEEEVLFKDILDKIELIGNENHGLYLADQYVKGIAK SRKSGS | 107 |
| | pCoV110 | S1-SSQC-T676-G-SQSIIAYT696-Ferritin | 855 | SSQCVNLTTRTQLPPAYTNSFTRGVYYPDKVFRSSVLHSTQDLFLPFFSN V TWFHAIHVSGTNGTKRFDNPVLPFNDGVYFASTEKSNIIRGWIFGTTLDS K TQSLLIVNNATNVVIKVCEFQFCNDPFLGVYYHKNNKSWMESEFRVYSSA NNCTFEYVSQPFLMDLEGKQGNFKNLREFVFKNIDGYFKIYSKHTPINLV R DLPQGFSALEPLVDLPIGINITRFQTLLALHRSYLTPGDSSSGWTAGAAA Y YVGYLQPRTFLLKYNENGTITDAVDCALDPLSETKCTLKSFTVEKGIYQT S NFRVQPTESIVRFPNITNLCPFGEVFNATRFASVYAWNRKRISNCVADYS V LYNSASFSTFKCYGVSPTKLNDLCFTNVYADSFVIRGDEVRQIAPGQTGK I ADYNYKLPDDFTGCVIAWNSNNLDSKVGGNYNYLYRLFRKSNLKPFERD ISTEIYQAGSTPCNGVEGFNCYFPLQSYGFQPTNGVGYQPYRVVVLSFEL L HAPATVCGPKKSTNLVKNKCVNFNFNGLTGTGVLTESNKKFLPFQQFGR DIADTTDAVRDPQTLEILDITPCSFGGVSVITPGTNTSNQVAVLYQDVNC T EVPVAIHADQLTPTWRVYSTGSNVFQTRAGCLIGAEHVNNSYECDIPIGA GICASYQTGSQSIIAYTGSGGGGESQVRQQFSKDIEKLLNEQVNKEMQSS N LYMSMSSWCYTHSLDGAGLFLFDHAAEEYEHAKKLIIFLNENNVPVQLTS ISAPEHKFEGLTQIFQKAYEHEQHISESINNIVDHAIKSKDHATFNFLQW YV AEQHEEEVLFKDILDKIELIGNENHGLYLADQYVKGIAKSRKSGS | 108 |
| | pCoV111 | S1-SSQC-T676-GG-SQSIIAYT696-Ferritin | 856 | SSQCVNLTTRTQLPPAYTNSFTRGVYYPDKVFRSSVLHSTQDLFLPFFSN V TWFHAIHVSGTNGTKRFDNPVLPFNDGVYFASTEKSNIIRGWIFGTTLDS K TQSLLIVNNATNVVIKVCEFQFCNDPFLGVYYHKNNKSWMESEFRVYSSA NNCTFEYVSQPFLMDLEGKQGNFKNLREFVFKNIDGYFKIYSKHTPINLV R DLPQGFSALEPLVDLPIGINITRFQTLLALHRSYLTPGDSSSGWTAGAAA Y YVGYLQPRTFLLKYNENGTITDAVDCALDPLSETKCTLKSFTVEKGIYQT S NFRVQPTESIVRFPNITNLCPFGEVFNATRFASVYAWNRKRISNCVADYS V LYNSASFSTFKCYGVSPTKLNDLCFTNVYADSFVIRGDEVRQIAPGQTGK I ADYNYKLPDDFTGCVIAWNSNNLDSKVGGNYNYLYRLFRKSNLKPFERD ISTEIYQAGSTPCNGVEGFNCYFPLQSYGFQPTNGVGYQPYRVVVLSFEL L HAPATVCGPKKSTNLVKNKCVNFNFNGLTGTGVLTESNKKFLPFQQFGR DIADTTDAVRDPQTLEILDITPCSFGGVSVITPGTNTSNQVAVLYQDVNC T EVPVAIHADQLTPTWRVYSTGSNVFQTRAGCLIGAEHVNNSYECDIPIGA GICASYQTGGSQSIIAYTGSGGGGESQVRQQFSKDIEKLLNEQVNKEMQS S NLYMSMSSWCYTHSLDGAGLFLFDHAAEEYEHAKKLIIFLNENNVPVQL TSISAPEHKFEGLTQIFQKAYEHEQHISESINNIVDHAIKSKDHATFNFL QW YVAEQHEEEVLFKDILDKIELIGNENHGLYLADQYVKGIAKSRKSGS | 109 |
| | pCoV112 | S1-SSQC-T676-PG-SQSIIAYT696-Ferritin | 856 | SSQCVNLTTRTQLPPAYTNSFTRGVYYPDKVFRSSVLHSTQDLFLPFFSN V TWFHAIHVSGTNGTKRFDNPVLPFNDGVYFASTEKSNIIRGWIFGTTLDS K TQSLLIVNNATNVVIKVCEFQFCNDPFLGVYYHKNNKSWMESEFRVYSSA NNCTFEYVSQPFLMDLEGKQGNFKNLREFVFKNIDGYFKIYSKHTPINLV R DLPQGFSALEPLVDLPIGINITRFQTLLALHRSYLTPGDSSSGWTAGAAA Y YVGYLQPRTFLLKYNENGTITDAVDCALDPLSETKCTLKSFTVEKGIYQT S NFRVQPTESIVRFPNITNLCPFGEVFNATRFASVYAWNRKRISNCVADYS V LYNSASFSTFKCYGVSPTKLNDLCFTNVYADSFVIRGDEVRQIAPGQTGK I ADYNYKLPDDFTGCVIAWNSNNLDSKVGGNYNYLYRLFRKSNLKPFERD ISTEIYQAGSTPCNGVEGFNCYFPLQSYGFQPTNGVGYQPYRVVVLSFEL L HAPATVCGPKKSTNLVKNKCVNFNFNGLTGTGVLTESNKKFLPFQQFGR DIADTTDAVRDPQTLEILDITPCSFGGVSVITPGTNTSNQVAVLYQDVNC T EVPVAIHADQLTPTWRVYSTGSNVFQTRAGCLIGAEHVNNSYECDIPIGA GICASYQTPGSQSIIAYTGSGGGGESQVRQQFSKDIEKLLNEQVNKEMQS S NLYMSMSSWCYTHSLDGAGLFLFDHAAEEYEHAKKLIIFLNENNVPVQL TSISAPEHKFEGLTQIFQKAYEHEQHISESINNIVDHAIKSKDHATFNFL QW YVAEQHEEEVLFKDILDKIELIGNENHGLYLADQYVKGIAKSRKSGS | 110 |
| | pCoV113 | S1-SSQC-312YQT to NYT-Ferritin | 848 | SSQCVNLTTRTQLPPAYTNSFTRGVYYPDKVFRSSVLHSTQDLFLPFFSN V TWFHAIHVSGTNGTKRFDNPVLPFNDGVYFASTEKSNIIRGWIFGTTLDS K TQSLLIVNNATNVVIKVCEFQFCNDPFLGVYYHKNNKSWMESEFRVYSSA NNCTFEYVSQPFLMDLEGKQGNFKNLREFVFKNIDGYFKIYSKHTPINLV R DLPQGFSALEPLVDLPIGINITRFQTLLALHRSYLTPGDSSSGWTAGAAA Y YVGYLQPRTFLLKYNENGTITDAVDCALDPLSETKCTLKSFTVEKGNYTT SNFRVQPTESIVRFPNITNLCPFGEVFNATRFASVYAWNRKRISNCVADY S VLYNSASFSTFKCYGVSPTKLNDLCFTNVYADSFVIRGDEVRQIAPGQTG KIADYNYKLPDDFTGCVIAWNSNNLDSKVGGNYNYLYRLFRKSNLKPFE RDISTEIYQAGSTPCNGVEGFNCYFPLQSYGFQPTNGVGYQPYRVVVLSF E LLHAPATVCGPKKSTNLVKNKCVNFNFNGLTGTGVLTESNKKFLPFQQFG RDIADTTDAVRDPQTLEILDITPCSFGGVSVITPGTNTSNQVAVLYQDVN C TEVPVAIHADQLTPTWRVYSTGSNVFQTRAGCLIGAEHVNNSYECDIPIG A GICASYQTQTGSGGGGESQVRQQFSKDIEKLLNEQVNKEMQSSNLYMSM SSWCYTHSLDGAGLFLFDHAAEEYEHAKKLIIFLNENNVPVQLTSISAPE H KFEGLTQIFQKAYEHEQHISESINNIVDHAIKSKDHATFNFLQWYVAEQH E EEVLFKDILDKIELIGNENHGLYLADQYVKGIAKSRKSGS | 111 |
| | pCoV114 | S1-SSQC-651IGA to NGS-Ferritin | 848 | SSQCVNLTTRTQLPPAYTNSFTRGVYYPDKVFRSSVLHSTQDLFLPFFSN V TWFHAIHVSGTNGTKRFDNPVLPFNDGVYFASTEKSNIIRGWIFGTTLDS K TQSLLIVNNATNVVIKVCEFQFCNDPFLGVYYHKNNKSWMESEFRVYSSA NNCTFEYVSQPFLMDLEGKQGNFKNLREFVFKNIDGYFKIYSKHTPINLV R DLPQGFSALEPLVDLPIGINITRFQTLLALHRSYLTPGDSSSGWTAGAAA Y YVGYLQPRTFLLKYNENGTITDAVDCALDPLSETKCTLKSFTVEKGIYQT S NFRVQPTESIVRFPNITNLCPFGEVFNATRFASVYAWNRKRISNCVADYS V LYNSASFSTFKCYGVSPTKLNDLCFTNVYADSFVIRGDEVRQIAPGQTGK I ADYNYKLPDDFTGCVIAWNSNNLDSKVGGNYNYLYRLFRKSNLKPFERD ISTEIYQAGSTPCNGVEGFNCYFPLQSYGFQPTNGVGYQPYRVVVLSFEL L HAPATVCGPKKSTNLVKNKCVNFNFNGLTGTGVLTESNKKFLPFQQFGR DIADTTDAVRDPQTLEILDITPCSFGGVSVITPGTNTSNQVAVLYQDVNC T EVPVAIHADQLTPTWRVYSTGSNVFQTRAGCLNGSEHVNNSYECDIPIGA GICASYQTQTGSGGGGESQVRQQFSKDIEKLLNEQVNKEMQSSNLYMSM SSWCYTHSLDGAGLFLFDHAAEEYEHAKKLIIFLNENNVPVQLTSISAPE H KFEGLTQIFQKAYEHEQHISESINNIVDHAIKSKDHATFNFLQWYVAEQH E EEVLFKDILDKIELIGNENHGLYLADQYVKGIAKSRKSGS | 112 |
| | pCoV115 | S1-SSQC-S316C-V595C-Ferritin | 848 | SSQCVNLTTRTQLPPAYTNSFTRGVYYPDKVFRSSVLHSTQDLFLPFFSN V TWFHAIHVSGTNGTKRFDNPVLPFNDGVYFASTEKSNIIRGWIFGTTLDS K TQSLLIVNNATNVVIKVCEFQFCNDPFLGVYYHKNNKSWMESEFRVYSSA NNCTFEYVSQPFLMDLEGKQGNFKNLREFVFKNIDGYFKIYSKHTPINLV R DLPQGFSALEPLVDLPIGINITRFQTLLALHRSYLTPGDSSSGWTAGAAA Y YVGYLQPRTFLLKYNENGTITDAVDCALDPLSETKCTLKSFTVEKGIYQT C NFRVQPTESIVRFPNITNLCPFGEVFNATRFASVYAWNRKRISNCVADYS V LYNSASFSTFKCYGVSPTKLNDLCFTNVYADSFVIRGDEVRQIAPGQTGK I ADYNYKLPDDFTGCVIAWNSNNLDSKVGGNYNYLYRLFRKSNLKPFERD ISTEIYQAGSTPCNGVEGFNCYFPLQSYGFQPTNGVGYQPYRVVVLSFEL L HAPATVCGPKKSTNLVKNKCVNFNFNGLTGTGVLTESNKKFLPFQQFGR DIADTTDAVRDPQTLEILDITPCSFGGCSVITPGTNTSNQVAVLYQDVNC T EVPVAIHADQLTPTWRVYSTGSNVFQTRAGCLIGAEHVNNSYECDIPIGA GICASYQTQTGSGGGGESQVRQQFSKDIEKLLNEQVNKEMQSSNLYMSM SSWCYTHSLDGAGLFLFDHAAEEYEHAKKLIIFLNENNVPVQLTSISAPE H KFEGLTQIFQKAYEHEQHISESINNIVDHAIKSKDHATFNFLQWYVAEQH E EEVLFKDILDKIELIGNENHGLYLADQYVKGIAKSRKSGS | 113 |
| | pCoV116 | S1-SSQC-V320C-S591C-Ferritin | 848 | SSQCVNLTTRTQLPPAYTNSFTRGVYYPDKVFRSSVLHSTQDLFLPFFSN V TWFHAIHVSGTNGTKRFDNPVLPFNDGVYFASTEKSNIIRGWIFGTTLDS K TQSLLIVNNATNVVIKVCEFQFCNDPFLGVYYHKNNKSWMESEFRVYSSA NNCTFEYVSQPFLMDLEGKQGNFKNLREFVFKNIDGYFKIYSKHTPINLV R DLPQGFSALEPLVDLPIGINITRFQTLLALHRSYLTPGDSSSGWTAGAAA Y YVGYLQPRTFLLKYNENGTITDAVDCALDPLSETKCTLKSFTVEKGIYQT S NFRCQPTESIVRFPNITNLCPFGEVFNATRFASVYAWNRKRISNCVADYS V LYNSASFSTFKCYGVSPTKLNDLCFTNVYADSFVIRGDEVRQIAPGQTGK I ADYNYKLPDDFTGCVIAWNSNNLDSKVGGNYNYLYRLFRKSNLKPFERD ISTEIYQAGSTPCNGVEGFNCYFPLQSYGFQPTNGVGYQPYRVVVLSFEL L HAPATVCGPKKSTNLVKNKCVNFNFNGLTGTGVLTESNKKFLPFQQFGR DIADTTDAVRDPQTLEILDITPCCFGGVSVITPGTNTSNQVAVLYQDVNC T EVPVAIHADQLTPTWRVYSTGSNVFQTRAGCLIGAEHVNNSYECDIPIGA GICASYQTQTGSGGGGESQVRQQFSKDIEKLLNEQVNKEMQSSNLYMSM SSWCYTHSLDGAGLFLFDHAAEEYEHAKKLIIFLNENNVPVQLTSISAPE H KFEGLTQIFQKAYEHEQHISESINNIVDHAIKSKDHATFNFLQWYVAEQH E EEVLFKDILDKIELIGNENHGLYLADQYVKGIAKSRKSGS | 114 |
| | pCoV117 | S1-SSQC-L560Q-F562H-Ferritin | 848 | SSQCVNLTTRTQLPPAYTNSFTRGVYYPDKVFRSSVLHSTQDLFLPFFSN V TWFHAIHVSGTNGTKRFDNPVLPFNDGVYFASTEKSNIIRGWIFGTTLDS K TQSLLIVNNATNVVIKVCEFQFCNDPFLGVYYHKNNKSWMESEFRVYSSA NNCTFEYVSQPFLMDLEGKQGNFKNLREFVFKNIDGYFKIYSKHTPINLV R DLPQGFSALEPLVDLPIGINITRFQTLLALHRSYLTPGDSSSGWTAGAAA Y YVGYLQPRTFLLKYNENGTITDAVDCALDPLSETKCTLKSFTVEKGIYQT S NFRVQPTESIVRFPNITNLCPFGEVFNATRFASVYAWNRKRISNCVADYS V LYNSASFSTFKCYGVSPTKLNDLCFTNVYADSFVIRGDEVRQIAPGQTGK I ADYNYKLPDDFTGCVIAWNSNNLDSKVGGNYNYLYRLFRKSNLKPFERD ISTEIYQAGSTPCNGVEGFNCYFPLQSYGFQPTNGVGYQPYRVVVLSFEL L HAPATVCGPKKSTNLVKNKCVNFNFNGLTGTGVLTESNKKFQPHQQFGR DIADTTDAVRDPQTLEILDITPCSFGGVSVITPGTNTSNQVAVLYQDVNC T EVPVAIHADQLTPTWRVYSTGSNVFQTRAGCLIGAEHVNNSYECDIPIGA GICASYQTQTGSGGGGESQVRQQFSKDIEKLLNEQVNKEMQSSNLYMSM SSWCYTHSLDGAGLFLFDHAAEEYEHAKKLIIFLNENNVPVQLTSISAPE H KFEGLTQIFQKAYEHEQHISESINNIVDHAIKSKDHATFNFLQWYVAEQH E EEVLFKDILDKIELIGNENHGLYLADQYVKGIAKSRKSGS | 115 |
| | pCoV118 | S1-SSQC-562FQQ to NQT-Ferritin | 848 | SSQCVNLTTRTQLPPAYTNSFTRGVYYPDKVFRSSVLHSTQDLFLPFFSN V TWFHAIHVSGTNGTKRFDNPVLPFNDGVYFASTEKSNIIRGWIFGTTLDS K TQSLLIVNNATNVVIKVCEFQFCNDPFLGVYYHKNNKSWMESEFRVYSSA NNCTFEYVSQPFLMDLEGKQGNFKNLREFVFKNIDGYFKIYSKHTPINLV R DLPQGFSALEPLVDLPIGINITRFQTLLALHRSYLTPGDSSSGWTAGAAA Y YVGYLQPRTFLLKYNENGTITDAVDCALDPLSETKCTLKSFTVEKGIYQT S NFRVQPTESIVRFPNITNLCPFGEVFNATRFASVYAWNRKRISNCVADYS V LYNSASFSTFKCYGVSPTKLNDLCFTNVYADSFVIRGDEVRQIAPGQTGK I ADYNYKLPDDFTGCVIAWNSNNLDSKVGGNYNYLYRLFRKSNLKPFERD ISTEIYQAGSTPCNGVEGFNCYFPLQSYGFQPTNGVGYQPYRVVVLSFEL L HAPATVCGPKKSTNLVKNKCVNFNFNGLTGTGVLTESNKKFLPNQTFGR DIADTTDAVRDPQTLEILDITPCSFGGVSVITPGTNTSNQVAVLYQDVNC T EVPVAIHADQLTPTWRVYSTGSNVFQTRAGCLIGAEHVNNSYECDIPIGA GICASYQTQTGSGGGGESQVRQQFSKDIEKLLNEQVNKEMQSSNLYMSM SSWCYTHSLDGAGLFLFDHAAEEYEHAKKLIIFLNENNVPVQLTSISAPE H KFEGLTQIFQKAYEHEQHISESINNIVDHAIKSKDHATFNFLQWYVAEQH E EEVLFKDILDKIELIGNENHGLYLADQYVKGIAKSRKSGS | 116 |
| | pCoV119 | S1-SSQC-F490R-Ferritin | 848 | SSQCVNLTTRTQLPPAYTNSFTRGVYYPDKVFRSSVLHSTQDLFLPFFSN V TWFHAIHVSGTNGTKRFDNPVLPFNDGVYFASTEKSNIIRGWIFGTTLDS K TQSLLIVNNATNVVIKVCEFQFCNDPFLGVYYHKNNKSWMESEFRVYSSA NNCTFEYVSQPFLMDLEGKQGNFKNLREFVFKNIDGYFKIYSKHTPINLV R DLPQGFSALEPLVDLPIGINITRFQTLLALHRSYLTPGDSSSGWTAGAAA Y YVGYLQPRTFLLKYNENGTITDAVDCALDPLSETKCTLKSFTVEKGIYQT S NFRVQPTESIVRFPNITNLCPFGEVFNATRFASVYAWNRKRISNCVADYS V LYNSASFSTFKCYGVSPTKLNDLCFTNVYADSFVIRGDEVRQIAPGQTGK I ADYNYKLPDDFTGCVIAWNSNNLDSKVGGNYNYLYRLFRKSNLKPFERD ISTEIYQAGSTPCNGVEGFNCYRPLQSYGFQPTNGVGYQPYRVVVLSFEL L HAPATVCGPKKSTNLVKNKCVNFNFNGLTGTGVLTESNKKFLPFQQFGR DIADTTDAVRDPQTLEILDITPCSFGGVSVITPGTNTSNQVAVLYQDVNC T EVPVAIHADQLTPTWRVYSTGSNVFQTRAGCLIGAEHVNNSYECDIPIGA GICASYQTQTGSGGGGESQVRQQFSKDIEKLLNEQVNKEMQSSNLYMSM SSWCYTHSLDGAGLFLFDHAAEEYEHAKKLIIFLNENNVPVQLTSISAPE H KFEGLTQIFQKAYEHEQHISESINNIVDHAIKSKDHATFNFLQWYVAEQH E EEVLFKDILDKIELIGNENHGLYLADQYVKGIAKSRKSGS | 117 |
| | pCoV120 | S1-SSQC-F490A-Ferritin | 848 | SSQCVNLTTRTQLPPAYTNSFTRGVYYPDKVFRSSVLHSTQDLFLPFFSN V TWFHAIHVSGTNGTKRFDNPVLPFNDGVYFASTEKSNIIRGWIFGTTLDS K TQSLLIVNNATNVVIKVCEFQFCNDPFLGVYYHKNNKSWMESEFRVYSSA NNCTFEYVSQPFLMDLEGKQGNFKNLREFVFKNIDGYFKIYSKHTPINLV R DLPQGFSALEPLVDLPIGINITRFQTLLALHRSYLTPGDSSSGWTAGAAA Y YVGYLQPRTFLLKYNENGTITDAVDCALDPLSETKCTLKSFTVEKGIYQT S NFRVQPTESIVRFPNITNLCPFGEVFNATRFASVYAWNRKRISNCVADYS V LYNSASFSTFKCYGVSPTKLNDLCFTNVYADSFVIRGDEVRQIAPGQTGK I ADYNYKLPDDFTGCVIAWNSNNLDSKVGGNYNYLYRLFRKSNLKPFERD ISTEIYQAGSTPCNGVEGFNCYAPLQSYGFQPTNGVGYQPYRVVVLSFEL L HAPATVCGPKKSTNLVKNKCVNFNFNGLTGTGVLTESNKKFLPFQQFGR DIADTTDAVRDPQTLEILDITPCSFGGVSVITPGTNTSNQVAVLYQDVNC T EVPVAIHADQLTPTWRVYSTGSNVFQTRAGCLIGAEHVNNSYECDIPIGA GICASYQTQTGSGGGGESQVRQQFSKDIEKLLNEQVNKEMQSSNLYMSM SSWCYTHSLDGAGLFLFDHAAEEYEHAKKLIIFLNENNVPVQLTSISAPE H KFEGLTQIFQKAYEHEQHISESINNIVDHAIKSKDHATFNFLQWYVAEQH E EEVLFKDILDKIELIGNENHGLYLADQYVKGIAKSRKSGS | 118 |
| | pCoV1B-05-PL-KV | PrefLead-S2P.1154-KV-del-Ferritin (no PP) | 1,314 | SSQCVNLTTRTQLPPAYTNSFTRGVYYPDKVFRSSVLHSTQDLFLPFFSN V TWFHAIHVSGTNGTKRFDNPVLPFNDGVYFASTEKSNIIRGWIFGTTLDS K TQSLLIVNNATNVVIKVCEFQFCNDPFLGVYYHKNNKSWMESEFRVYSSA NNCTFEYVSQPFLMDLEGKQGNFKNLREFVFKNIDGYFKIYSKHTPINLV R DLPQGFSALEPLVDLPIGINITRFQTLLALHRSYLTPGDSSSGWTAGAAA Y YVGYLQPRTFLLKYNENGTITDAVDCALDPLSETKCTLKSFTVEKGIYQT S NFRVQPTESIVRFPNITNLCPFGEVFNATRFASVYAWNRKRISNCVADYS V LYNSASFSTFKCYGVSPTKLNDLCFTNVYADSFVIRGDEVRQIAPGQTGK I ADYNYKLPDDFTGCVIAWNSNNLDSKVGGNYNYLYRLFRKSNLKPFERD ISTEIYQAGSTPCNGVEGFNCYFPLQSYGFQPTNGVGYQPYRVVVLSFEL L HAPATVCGPKKSTNLVKNKCVNFNFNGLTGTGVLTESNKKFLPFQQFGR DIADTTDAVRDPQTLEILDITPCSFGGVSVITPGTNTSNQVAVLYQDVNC T EVPVAIHADQLTPTWRVYSTGSNVFQTRAGCLIGAEHVNNSYECDIPIGA GICASYQTQTNSPGSASSVASQSIIAYTMSLGAENSVAYSNNSIAIPTNF TIS VTTEILPVSMTKTSVDCTMYICGDSTECSNLLLQYGSFCTQLNRALTGIA V EQDKNTQEVFAQVKQIYKTPPIKDFGGFNFSQILPDPSKPSKRSFIEDLL FN KVTLADAGFIKQYGDCLGDIAARDLICAQKFNGLTVLPPLLTDEMIAQYT SALLAGTITSGWTFGAGAALQIPFAMQMAYRFNGIGVTQNVLYENQKLIA NQFNSAIGKIQDSLSSTASALGKLQDVVNQNAQALNTLVKQLSSNFGAIS S VLNDILSRLDKVEAEVQIDRLITGRLQSLQTYVTQQLIRAAEIRASANLA A TKMSECVLGQSKRVDFCGKGYHLMSFPQSAPHGVVFLHVTYVPAQEKNF TTAPAICHDGKAHFPREGVFVSNGTHWFVTQRNFYEPQIITTDNTFVSGN C DVVIGIVNNTVYDPLQPELDSFKEELDKGSGGSGDIIKLLNEQVNKEMQS S NLYMSMSSWCYTHSLDGAGLFLFDHAAEEYEHAKKLIIFLNENNVPVQL TSISAPEHKFEGLTQIFQKAYEHEQHISESINNIVDHAIKSKDHATFNFL QW YVAEQHEEEVLFKDILDKIELIGNENHGLYLADQYVKGIAKSRKSGS | 119 |
| RBD-NTD-Ferr | pCoV122 | His8-3c-RBD-GSGGSG-NTD-SSQC-Ferrritin (from domain fusion sheet) | 694 | HHHHHHHHGPLEVLFQGPNITNLCPFGEVFNATRFASVYAWNRKRISNCV ADYSVLYNSASFSTFKCYGVSPTKLNDLCFTNVYADSFVIRGDEVRQIAP GQTGKIADYNYKLPDDFTGCVIAWNSNNLDSKVGGNYNYLYRLFRKSNL KPFERDISTEIYQAGSTPCNGVEGFNCYFPLQSYGFQPTNGVGYQPYRVV VLSFELLHAPATVCGPGSGGSGSSQCVNLTTRTQLPPAYTNSFTRGVYYP DKVFRSSVLHSTQDLFLPFFSNVTWFHAIHVSGTNGTKRFDNPVLPFNDG VYFASTEKSNIIRGWIFGTTLDSKTQSLLIVNNATNVVIKVCEFQFCNDP FL GVYYHKNNKSWMESEFRVYSSANNCTFEYVSQPFLMDLEGKQGNFKNL REFVFKNIDGYFKIYSKHTPINLVRDLPQGFSALEPLVDLPIGINITRFQ TLL ALHRSYLTPGDSSSGWTAGAAAYYVGYLQPRTFLLKYNENGTITDAVDC ALDPLSETKCTLGSGGGGESQVRQQFSKDIEKLLNEQVNKEMQSSNLYMS MSSWCYTHSLDGAGLFLFDHAAEEYEHAKKLIIFLNENNVPVQLTSISAP E HKFEGLTQIFQKAYEHEQHISESINNIVDHAIKSKDHATFNFLQWYVAEQ H EEEVLFKDILDKIELIGNENHGLYLADQYVKGIAKSRKSGS | 120 |
| RBD- NTD-Ferr with 56 mutation | pCoV123 | His8-3c-RBD-F490R-GSGGSG-NTD-SSQC-Ferrritin | 694 | HHHHHHHHGPLEVLFQGPNITNLCPFGEVFNATRFASVYAWNRKRISNCV ADYSVLYNSASFSTFKCYGVSPTKLNDLCFTNVYADSFVIRGDEVRQIAP GQTGKIADYNYKLPDDFTGCVIAWNSNNLDSKVGGNYNYLYRLFRKSNL KPFERDISTEIYQAGSTPCNGVEGFNCYRPLQSYGFQPTNGVGYQPYRVV VLSFELLHAPATVCGPGSGGSGSSQCVNLTTRTQLPPAYTNSFTRGVYYP DKVFRSSVLHSTQDLFLPFFSNVTWFHAIHVSGTNGTKRFDNPVLPFNDG VYFASTEKSNIIRGWIFGTTLDSKTQSLLIVNNATNVVIKVCEFQFCNDP FL GVYYHKNNKSWMESEFRVYSSANNCTFEYVSQPFLMDLEGKQGNFKNL REFVFKNIDGYFKIYSKHTPINLVRDLPQGFSALEPLVDLPIGINITRFQ TLL ALHRSYLTPGDSSSGWTAGAAAYYVGYLQPRTFLLKYNENGTITDAVDC ALDPLSETKCTLGSGGGGESQVRQQFSKDIEKLLNEQVNKEMQSSNLYMS MSSWCYTHSLDGAGLFLFDHAAEEYEHAKKLIIFLNENNVPVQLTSISAP E HKFEGLTQIFQKAYEHEQHISESINNIVDHAIKSKDHATFNFLQWYVAEQ H EEEVLFKDILDKIELIGNENHGLYLADQYVKGIAKSRKSGS | 121 |
| RBD-NTD-Ferr with 57 mutation | pCoV124 | His8-3c-RBD-F490A-GSGGSG-NTD-SSQC-Ferrritin | 694 | HHHHHHHHGPLEVLFQGPNITNLCPFGEVFNATRFASVYAWNRKRISNCV ADYSVLYNSASFSTFKCYGVSPTKLNDLCFTNVYADSFVIRGDEVRQIAP GQTGKIADYNYKLPDDFTGCVIAWNSNNLDSKVGGNYNYLYRLFRKSNL KPFERDISTEIYQAGSTPCNGVEGFNCYAPLQSYGFQPTNGVGYQPYRVV VLSFELLHAPATVCGPGSGGSGSSQCVNLTTRTQLPPAYTNSFTRGVYYP DKVFRSSVLHSTQDLFLPFFSNVTWFHAIHVSGTNGTKRFDNPVLPFNDG VYFASTEKSNIIRGWIFGTTLDSKTQSLLIVNNATNVVIKVCEFQFCNDP FL GVYYHKNNKSWMESEFRVYSSANNCTFEYVSQPFLMDLEGKQGNFKNL REFVFKNIDGYFKIYSKHTPINLVRDLPQGFSALEPLVDLPIGINITRFQ TLL ALHRSYLTPGDSSSGWTAGAAAYYVGYLQPRTFLLKYNENGTITDAVDC ALDPLSETKCTLGSGGGGESQVRQQFSKDIEKLLNEQVNKEMQSSNLYMS MSSWCYTHSLDGAGLFLFDHAAEEYEHAKKLIIFLNENNVPVQLTSISAP E HKFEGLTQIFQKAYEHEQHISESINNIVDHAIKSKDHATFNFLQWYVAEQ H EEEVLFKDILDKIELIGNENHGLYLADQYVKGIAKSRKSGS | 122 |
| RBD-NTD-Ferr with 58 mutation | pCoV125 | His8-3c-RBD-518LLH to NKS-GSGGSG-NTD-SSQC-Ferrritin | 694 | HHHHHHHHGPLEVLFQGPNITNLCPFGEVFNATRFASVYAWNRKRISNCV ADYSVLYNSASFSTFKCYGVSPTKLNDLCFTNVYADSFVIRGDEVRQIAP GQTGKIADYNYKLPDDFTGCVIAWNSNNLDSKVGGNYNYLYRLFRKSNL KPFERDISTEIYQAGSTPCNGVEGFNCYFPLQSYGFQPTNGVGYQPYRVV VLSFENKSAPATVCGPGSGGSGSSQCVNLTTRTQLPPAYTNSFTRGVYYP DKVFRSSVLHSTQDLFLPFFSNVTWFHAIHVSGTNGTKRFDNPVLPFNDG VYFASTEKSNIIRGWIFGTTLDSKTQSLLIVNNATNVVIKVCEFQFCNDP FL GVYYHKNNKSWMESEFRVYSSANNCTFEYVSQPFLMDLEGKQGNFKNL REFVFKNIDGYFKIYSKHTPINLVRDLPQGFSALEPLVDLPIGINITRFQ TLL ALHRSYLTPGDSSSGWTAGAAAYYVGYLQPRTFLLKYNENGTITDAVDC ALDPLSETKCTLGSGGGGESQVRQQFSKDIEKLLNEQVNKEMQSSNLYMS MSSWCYTHSLDGAGLFLFDHAAEEYEHAKKLIIFLNENNVPVQLTSISAP E HKFEGLTQIFQKAYEHEQHISESINNIVDHAIKSKDHATFNFLQWYVAEQ H EEEVLFKDILDKIELIGNENHGLYLADQYVKGIAKSRKSGS | 123 |
| RBD-NTD-Ferr with 59 mutation | pCoV126 | His8-3c-RBD-L518R-GSGGSG-NTD-SSQC-Ferrritin | 694 | HHHHHHHHGPLEVLFQGPNITNLCPFGEVFNATRFASVYAWNRKRISNCV ADYSVLYNSASFSTFKCYGVSPTKLNDLCFTNVYADSFVIRGDEVRQIAP GQTGKIADYNYKLPDDFTGCVIAWNSNNLDSKVGGNYNYLYRLFRKSNL KPFERDISTEIYQAGSTPCNGVEGFNCYFPLQSYGFQPTNGVGYQPYRVV VLSFELRHAPATVCGPGSGGSGSSQCVNLTTRTQLPPAYTNSFTRGVYYP DKVFRSSVLHSTQDLFLPFFSNVTWFHAIHVSGTNGTKRFDNPVLPFNDG VYFASTEKSNIIRGWIFGTTLDSKTQSLLIVNNATNVVIKVCEFQFCNDP FL GVYYHKNNKSWMESEFRVYSSANNCTFEYVSQPFLMDLEGKQGNFKNL REFVFKNIDGYFKIYSKHTPINLVRDLPQGFSALEPLVDLPIGINITRFQ TLL ALHRSYLTPGDSSSGWTAGAAAYYVGYLQPRTFLLKYNENGTITDAVDC ALDPLSETKCTLGSGGGGESQVRQQFSKDIEKLLNEQVNKEMQSSNLYMS MSSWCYTHSLDGAGLFLFDHAAEEYEHAKKLIIFLNENNVPVQLTSISAP E HKFEGLTQIFQKAYEHEQHISESINNIVDHAIKSKDHATFNFLQWYVAEQ H EEEVLFKDILDKIELIGNENHGLYLADQYVKGIAKSRKSGS | 124 |
| 57 + 58 | pCoV127 | His8-3c-RBD-Ferritin-F490A-518LLH to 518 NKS | 396 | HHHHHHHHGPLEVLFQGPNITNLCPFGEVFNATRFASVYAWNRKRISNCV ADYSVLYNSASFSTFKCYGVSPTKLNDLCFTNVYADSFVIRGDEVRQIAP GQTGKIADYNYKLPDDFTGCVIAWNSNNLDSKVGGNYNYLYRLFRKSNL KPFERDISTEIYQAGSTPCNGVEGFNCYAPLQSYGFQPTNGVGYQPYRVV VLSFENKSAPATVCGPGSGGGGESQVRQQFSKDIEKLLNEQVNKEMQSSN LYMSMSSWCYTHSLDGAGLFLFDHAAEEYEHAKKLIIFLNENNVPVQLTS ISAPEHKFEGLTQIFQKAYEHEQHISESINNIVDHAIKSKDHATFNFLQW YV AEQHEEEVLFKDILDKIELIGNENHGLYLADQYVKGIAKSRKSGS | 125 |
| 57 + 59 | pCoV128 | His8-3c-RBD-Ferritin-F490A-L518R | 396 | HHHHHHHHGPLEVLFQGPNITNLCPFGEVFNATRFASVYAWNRKRISNCV ADYSVLYNSASFSTFKCYGVSPTKLNDLCFTNVYADSFVIRGDEVRQIAP GQTGKIADYNYKLPDDFTGCVIAWNSNNLDSKVGGNYNYLYRLFRKSNL KPFERDISTEIYQAGSTPCNGVEGFNCYAPLQSYGFQPTNGVGYQPYRVV VLSFELRHAPATVCGPGSGGGGESQVRQQFSKDIEKLLNEQVNKEMQSSN LYMSMSSWCYTHSLDGAGLFLFDHAAEEYEHAKKLIIFLNENNVPVQLTS ISAPEHKFEGLTQIFQKAYEHEQHISESINNIVDHAIKSKDHATFNFLQW YV AEQHEEEVLFKDILDKIELIGNENHGLYLADQYVKGIAKSRKSGS | 126 |
| 50 + 58 | pCoV129 | His8-3c-RBD-Ferritin-L455R/Y449K /F490R-518LLH to NKS | 396 | HHHHHHHHGPLEVLFQGPNITNLCPFGEVFNATRFASVYAWNRKRISNCV ADYSVLYNSASFSTFKCYGVSPTKLNDLCFTNVYADSFVIRGDEVRQIAP GQTGKIADYNYKLPDDFTGCVIAWNSNNLDSKVGGNKNYLYRRFRKSNL KPFERDISTEIYQAGSTPCNGVEGFNCYRPLQSYGFQPTNGVGYQPYRVV VLSFENKSAPATVCGPGSGGGGESQVRQQFSKDIEKLLNEQVNKEMQSSN LYMSMSSWCYTHSLDGAGLFLFDHAAEEYEHAKKLIIFLNENNVPVQLTS ISAPEHKFEGLTQIFQKAYEHEQHISESINNIVDHAIKSKDHATFNFLQW YV AEQHEEEVLFKDILDKIELIGNENHGLYLADQYVKGIAKSRKSGS | 127 |
| 50 + 59 | pCoV130 | His8-3c-RBD-Ferritin-L455R/Y449K /F490R-L518R | 396 | HHHHHHHHGPLEVLFQGPNITNLCPFGEVFNATRFASVYAWNRKRISNCV ADYSVLYNSASFSTFKCYGVSPTKLNDLCFTNVYADSFVIRGDEVRQIAP GQTGKIADYNYKLPDDFTGCVIAWNSNNLDSKVGGNKNYLYRRFRKSNL KPFERDISTEIYQAGSTPCNGVEGFNCYRPLQSYGFQPTNGVGYQPYRVV VLSFELRHAPATVCGPGSGGGGESQVRQQFSKDIEKLLNEQVNKEMQSSN LYMSMSSWCYTHSLDGAGLFLFDHAAEEYEHAKKLIIFLNENNVPVQLTS ISAPEHKFEGLTQIFQKAYEHEQHISESINNIVDHAIKSKDHATFNFLQW YV AEQHEEEVLFKDILDKIELIGNENHGLYLADQYVKGIAKSRKSGS | 128 |
| 53 + 58 | pCoV131 | His8-3c-RBD-Ferritin-Y453R-518LLH to NKS | 396 | HHHHHHHHGPLEVLFQGPNITNLCPFGEVFNATRFASVYAWNRKRISNCV ADYSVLYNSASFSTFKCYGVSPTKLNDLCFTNVYADSFVIRGDEVRQIAP GQTGKIADYNYKLPDDFTGCVIAWNSNNLDSKVGGNYNYLRRLFRKSNL KPFERDISTEIYQAGSTPCNGVEGFNCYFPLQSYGFQPTNGVGYQPYRVV VLSFENKSAPATVCGPGSGGGGESQVRQQFSKDIEKLLNEQVNKEMQSSN LYMSMSSWCYTHSLDGAGLFLFDHAAEEYEHAKKLIIFLNENNVPVQLTS ISAPEHKFEGLTQIFQKAYEHEQHISESINNIVDHAIKSKDHATFNFLQW YV AEQHEEEVLFKDILDKIELIGNENHGLYLADQYVKGIAKSRKSGS | 129 |
| 53 + 59 | pCoV132 | His8-3c-RBD-Ferritin-Y453R-L518R | 396 | HHHHHHHHGPLEVLFQGPNITNLCPFGEVFNATRFASVYAWNRKRISNCV ADYSVLYNSASFSTFKCYGVSPTKLNDLCFTNVYADSFVIRGDEVRQIAP GQTGKIADYNYKLPDDFTGCVIAWNSNNLDSKVGGNYNYLRRLFRKSNL KPFERDISTEIYQAGSTPCNGVEGFNCYFPLQSYGFQPTNGVGYQPYRVV VLSFELRHAPATVCGPGSGGGGESQVRQQFSKDIEKLLNEQVNKEMQSSN LYMSMSSWCYTHSLDGAGLFLFDHAAEEYEHAKKLIIFLNENNVPVQLTS ISAPEHKFEGLTQIFQKAYEHEQHISESINNIVDHAIKSKDHATFNFLQW YV AEQHEEEVLFKDILDKIELIGNENHGLYLADQYVKGIAKSRKSGS | 130 |
| Native spike leader | pCoV141 | NatLead-S2P-D614G-Foldon-3c-Strep-His8 | 1,271 | VNLTTRTQLPPAYTNSFTRGVYYPDKVFRSSVLHSTQDLFLPFFSNVTWF HAIHVSGTNGTKRFDNPVLPFNDGVYFASTEKSNIIRGWIFGTTLDSKTQ S LLIVNNATNVVIKVCEFQFCNDPFLGVYYHKNNKSWMESEFRVYSSANN CTFEYVSQPFLMDLEGKQGNFKNLREFVFKNIDGYFKIYSKHTPINLVRD L PQGFSALEPLVDLPIGINITRFQTLLALHRSYLTPGDSSSGWTAGAAAYY V GYLQPRTFLLKYNENGTITDAVDCALDPLSETKCTLKSFTVEKGIYQTSN F RVQPTESIVRFPNITNLCPFGEVFNATRFASVYAWNRKRISNCVADYSVL Y NSASFSTFKCYGVSPTKLNDLCFTNVYADSFVIRGDEVRQIAPGQTGKIA D YNYKLPDDFTGCVIAWNSNNLDSKVGGNYNYLYRLFRKSNLKPFERDIST EIYQAGSTPCNGVEGFNCYFPLQSYGFQPTNGVGYQPYRVVVLSFELLHA PATVCGPKKSTNLVKNKCVNFNFNGLTGTGVLTESNKKFLPFQQFGRDIA DTTDAVRDPQTLEILDITPCSFGGVSVITPGTNTSNQVAVLYQGVNCTEV P VAIHADQLTPTWRVYSTGSNVFQTRAGCLIGAEHVNNSYECDIPIGAGIC A SYQTQTNSPGSASSVASQSIIAYTMSLGAENSVAYSNNSIAIPTNFTISV TTE ILPVSMTKTSVDCTMYICGDSTECSNLLLQYGSFCTQLNRALTGIAVEQD K NTQEVFAQVKQIYKTPPIKDFGGFNFSQILPDPSKPSKRSFIEDLLFNKV TL ADAGFIKQYGDCLGDIAARDLICAQKFNGLTVLPPLLTDEMIAQYTSALL AGTITSGWTFGAGAALQIPFAMQMAYRFNGIGVTQNVLYENQKLIANQF NSAIGKIQDSLSSTASALGKLQDVVNQNAQALNTLVKQLSSNFGAISSVL N DILSRLDPPEAEVQIDRLITGRLQSLQTYVTQQLIRAAEIRASANLAATK MS ECVLGQSKRVDFCGKGYHLMSFPQSAPHGVVFLHVTYVPAQEKNFTTAP AICHDGKAHFPREGVFVSNGTHWFVTQRNFYEPQIITTDNTFVSGNCDVV I GIVNNTVYDPLQPELDSFKEELDKYFKNHTSPDVDLGDISGINASVVNIQ K EIDRLNEVAKNLNESLIDLQELGKYEQGSGYIPEAPRDGQAYVRKDGEWV LLSTFLGLEVLFQGPSAWSHPQFEKGGGSGGGSGGSAWSHPQFEKGSHH HHHHHH | 131 |
| | pCoV142 | NatLead-S-KV-Foldon-3c-Strep-His8 | 1,271 | VNLTTRTQLPPAYTNSFTRGVYYPDKVFRSSVLHSTQDLFLPFFSNVTWF HAIHVSGTNGTKRFDNPVLPFNDGVYFASTEKSNIIRGWIFGTTLDSKTQ S LLIVNNATNVVIKVCEFQFCNDPFLGVYYHKNNKSWMESEFRVYSSANN CTFEYVSQPFLMDLEGKQGNFKNLREFVFKNIDGYFKIYSKHTPINLVRD L PQGFSALEPLVDLPIGINITRFQTLLALHRSYLTPGDSSSGWTAGAAAYY V GYLQPRTFLLKYNENGTITDAVDCALDPLSETKCTLKSFTVEKGIYQTSN F RVQPTESIVRFPNITNLCPFGEVFNATRFASVYAWNRKRISNCVADYSVL Y NSASFSTFKCYGVSPTKLNDLCFTNVYADSFVIRGDEVRQIAPGQTGKIA D YNYKLPDDFTGCVIAWNSNNLDSKVGGNYNYLYRLFRKSNLKPFERDIST EIYQAGSTPCNGVEGFNCYFPLQSYGFQPTNGVGYQPYRVVVLSFELLHA PATVCGPKKSTNLVKNKCVNFNFNGLTGTGVLTESNKKFLPFQQFGRDIA DTTDAVRDPQTLEILDITPCSFGGVSVITPGTNTSNQVAVLYQDVNCTEV P VAIHADQLTPTWRVYSTGSNVFQTRAGCLIGAEHVNNSYECDIPIGAGIC A SYQTQTNSPGSASSVASQSIIAYTMSLGAENSVAYSNNSIAIPTNFTISV TTE ILPVSMTKTSVDCTMYICGDSTECSNLLLQYGSFCTQLNRALTGIAVEQD K NTQEVFAQVKQIYKTPPIKDFGGFNFSQILPDPSKPSKRSFIEDLLFNKV TL ADAGFIKQYGDCLGDIAARDLICAQKFNGLTVLPPLLTDEMIAQYTSALL AGTITSGWTFGAGAALQIPFAMQMAYRFNGIGVTQNVLYENQKLIANQF NSAIGKIQDSLSSTASALGKLQDVVNQNAQALNTLVKQLSSNFGAISSVL N DILSRLDKVEAEVQIDRLITGRLQSLQTYVTQQLIRAAEIRASANLAATK M SECVLGQSKRVDFCGKGYHLMSFPQSAPHGVVFLHVTYVPAQEKNFTTA PAICHDGKAHFPREGVFVSNGTHWFVTQRNFYEPQIITTDNTFVSGNCDV VIGIVNNTVYDPLQPELDSFKEELDKYFKNHTSPDVDLGDISGINASVVN I QKEIDRLNEVAKNLNESLIDLQELGKYEQGSGYIPEAPRDGQAYVRKDGE WVLLSTFLGLEVLFQGPSAWSHPQFEKGGGSGGGSGGSAWSHPQFEKGS HHHHHHHH | 132 |
| | pCoV143 | NatLead-S-KV-D614G-Foldon-3c-Strep-His8 | 1,271 | VNLTTRTQLPPAYTNSFTRGVYYPDKVFRSSVLHSTQDLFLPFFSNVTWF HAIHVSGTNGTKRFDNPVLPFNDGVYFASTEKSNIIRGWIFGTTLDSKTQ S LLIVNNATNVVIKVCEFQFCNDPFLGVYYHKNNKSWMESEFRVYSSANN CTFEYVSQPFLMDLEGKQGNFKNLREFVFKNIDGYFKIYSKHTPINLVRD L PQGFSALEPLVDLPIGINITRFQTLLALHRSYLTPGDSSSGWTAGAAAYY V GYLQPRTFLLKYNENGTITDAVDCALDPLSETKCTLKSFTVEKGIYQTSN F RVQPTESIVRFPNITNLCPFGEVFNATRFASVYAWNRKRISNCVADYSVL Y NSASFSTFKCYGVSPTKLNDLCFTNVYADSFVIRGDEVRQIAPGQTGKIA D YNYKLPDDFTGCVIAWNSNNLDSKVGGNYNYLYRLFRKSNLKPFERDIST EIYQAGSTPCNGVEGFNCYFPLQSYGFQPTNGVGYQPYRVVVLSFELLHA PATVCGPKKSTNLVKNKCVNFNFNGLTGTGVLTESNKKFLPFQQFGRDIA DTTDAVRDPQTLEILDITPCSFGGVSVITPGTNTSNQVAVLYQGVNCTEV P VAIHADQLTPTWRVYSTGSNVFQTRAGCLIGAEHVNNSYECDIPIGAGIC A SYQTQTNSPGSASSVASQSIIAYTMSLGAENSVAYSNNSIAIPTNFTISV TTE ILPVSMTKTSVDCTMYICGDSTECSNLLLQYGSFCTQLNRALTGIAVEQD K NTQEVFAQVKQIYKTPPIKDFGGFNFSQILPDPSKPSKRSFIEDLLFNKV TL ADAGFIKQYGDCLGDIAARDLICAQKFNGLTVLPPLLTDEMIAQYTSALL AGTITSGWTFGAGAALQIPFAMQMAYRFNGIGVTQNVLYENQKLIANQF NSAIGKIQDSLSSTASALGKLQDVVNQNAQALNTLVKQLSSNFGAISSVL N DILSRLDKVEAEVQIDRLITGRLQSLQTYVTQQLIRAAEIRASANLAATK M SECVLGQSKRVDFCGKGYHLMSFPQSAPHGVVFLHVTYVPAQEKNFTTA PAICHDGKAHFPREGVFVSNGTHWFVTQRNFYEPQIITTDNTFVSGNCDV VIGIVNNTVYDPLQPELDSFKEELDKYFKNHTSPDVDLGDISGINASVVN I QKEIDRLNEVAKNLNESLIDLQELGKYEQGSGYIPEAPRDGQAYVRKDGE WVLLSTFLGLEVLFQGPSAWSHPQFEKGGGSGGGSGGSAWSHPQFEKGS HHHHHHHH | 133 |
| | pCoV144 | NatLead-S-KV-RRAR-Foldon-3c-Strep-His8 | 1,271 | VNLTTRTQLPPAYTNSFTRGVYYPDKVFRSSVLHSTQDLFLPFFSNVTWF HAIHVSGTNGTKRFDNPVLPFNDGVYFASTEKSNIIRGWIFGTTLDSKTQ S LLIVNNATNVVIKVCEFQFCNDPFLGVYYHKNNKSWMESEFRVYSSANN CTFEYVSQPFLMDLEGKQGNFKNLREFVFKNIDGYFKIYSKHTPINLVRD L PQGFSALEPLVDLPIGINITRFQTLLALHRSYLTPGDSSSGWTAGAAAYY V GYLQPRTFLLKYNENGTITDAVDCALDPLSETKCTLKSFTVEKGIYQTSN F RVQPTESIVRFPNITNLCPFGEVFNATRFASVYAWNRKRISNCVADYSVL Y NSASFSTFKCYGVSPTKLNDLCFTNVYADSFVIRGDEVRQIAPGQTGKIA D YNYKLPDDFTGCVIAWNSNNLDSKVGGNYNYLYRLFRKSNLKPFERDIST EIYQAGSTPCNGVEGFNCYFPLQSYGFQPTNGVGYQPYRVVVLSFELLHA PATVCGPKKSTNLVKNKCVNFNFNGLTGTGVLTESNKKFLPFQQFGRDIA DTTDAVRDPQTLEILDITPCSFGGVSVITPGTNTSNQVAVLYQDVNCTEV P VAIHADQLTPTWRVYSTGSNVFQTRAGCLIGAEHVNNSYECDIPIGAGIC A SYQTQTNSPRRARSVASQSIIAYTMSLGAENSVAYSNNSIAIPTNFTISV TT EILPVSMTKTSVDCTMYICGDSTECSNLLLQYGSFCTQLNRALTGIAVEQ D KNTQEVFAQVKQIYKTPPIKDFGGFNFSQILPDPSKPSKRSFIEDLLFNK VT LADAGFIKQYGDCLGDIAARDLICAQKFNGLTVLPPLLTDEMIAQYTSAL L AGTITSGWTFGAGAALQIPFAMQMAYRFNGIGVTQNVLYENQKLIANQF NSAIGKIQDSLSSTASALGKLQDVVNQNAQALNTLVKQLSSNFGAISSVL N DILSRLDKVEAEVQIDRLITGRLQSLQTYVTQQLIRAAEIRASANLAATK M SECVLGQSKRVDFCGKGYHLMSFPQSAPHGVVFLHVTYVPAQEKNFTTA PAICHDGKAHFPREGVFVSNGTHWFVTQRNFYEPQIITTDNTFVSGNCDV VIGIVNNTVYDPLQPELDSFKEELDKYFKNHTSPDVDLGDISGINASVVN I QKEIDRLNEVAKNLNESLIDLQELGKYEQGSGYIPEAPRDGQAYVRKDGE WVLLSTFLGLEVLFQGPSAWSHPQFEKGGGSGGGSGGSAWSHPQFEKGS HHHHHHHH | 134 |
| | pCoV145 | NatLead-S-KV-RRAR-D614G-Foldon-3c-Strep-His8 | 1,271 | VNLTTRTQLPPAYTNSFTRGVYYPDKVFRSSVLHSTQDLFLPFFSNVTWF HAIHVSGTNGTKRFDNPVLPFNDGVYFASTEKSNIIRGWIFGTTLDSKTQ S LLIVNNATNVVIKVCEFQFCNDPFLGVYYHKNNKSWMESEFRVYSSANN CTFEYVSQPFLMDLEGKQGNFKNLREFVFKNIDGYFKIYSKHTPINLVRD L PQGFSALEPLVDLPIGINITRFQTLLALHRSYLTPGDSSSGWTAGAAAYY V GYLQPRTFLLKYNENGTITDAVDCALDPLSETKCTLKSFTVEKGIYQTSN F RVQPTESIVRFPNITNLCPFGEVFNATRFASVYAWNRKRISNCVADYSVL Y NSASFSTFKCYGVSPTKLNDLCFTNVYADSFVIRGDEVRQIAPGQTGKIA D YNYKLPDDFTGCVIAWNSNNLDSKVGGNYNYLYRLFRKSNLKPFERDIST EIYQAGSTPCNGVEGFNCYFPLQSYGFQPTNGVGYQPYRVVVLSFELLHA PATVCGPKKSTNLVKNKCVNFNFNGLTGTGVLTESNKKFLPFQQFGRDIA DTTDAVRDPQTLEILDITPCSFGGVSVITPGTNTSNQVAVLYQGVNCTEV P VAIHADQLTPTWRVYSTGSNVFQTRAGCLIGAEHVNNSYECDIPIGAGIC A SYQTQTNSPRRARSVASQSIIAYTMSLGAENSVAYSNNSIAIPTNFTISV TT EILPVSMTKTSVDCTMYICGDSTECSNLLLQYGSFCTQLNRALTGIAVEQ D KNTQEVFAQVKQIYKTPPIKDFGGFNFSQILPDPSKPSKRSFIEDLLFNK VT LADAGFIKQYGDCLGDIAARDLICAQKFNGLTVLPPLLTDEMIAQYTSAL L AGTITSGWTFGAGAALQIPFAMQMAYRFNGIGVTQNVLYENQKLIANQF NSAIGKIQDSLSSTASALGKLQDVVNQNAQALNTLVKQLSSNFGAISSVL N DILSRLDKVEAEVQIDRLITGRLQSLQTYVTQQLIRAAEIRASANLAATK M SECVLGQSKRVDFCGKGYHLMSFPQSAPHGVVFLHVTYVPAQEKNFTTA PAICHDGKAHFPREGVFVSNGTHWFVTQRNFYEPQIITTDNTFVSGNCDV VIGIVNNTVYDPLQPELDSFKEELDKYFKNHTSPDVDLGDISGINASVVN I QKEIDRLNEVAKNLNESLIDLQELGKYEQGSGYIPEAPRDGQAYVRKDGE WVLLSTFLGLEVLFQGPSAWSHPQFEKGGGSGGGSGGSAWSHPQFEKGS HHHHHHHH | 135 |
| RBD-NTD-Ferr with 53 + 58 mut | pCoV146 | His8-3c-RBD-Y453R-518LLH to NKS-GSGGSG-NTD-SSQC-Ferrritin | 694 | HHHHHHHHGPLEVLFQGPNITNLCPFGEVFNATRFASVYAWNRKRISNCV ADYSVLYNSASFSTFKCYGVSPTKLNDLCFTNVYADSFVIRGDEVRQIAP GQTGKIADYNYKLPDDFTGCVIAWNSNNLDSKVGGNYNYLRRLFRKSNL KPFERDISTEIYQAGSTPCNGVEGFNCYFPLQSYGFQPTNGVGYQPYRVV VLSFENKSAPATVCGPGSGGSGSSQCVNLTTRTQLPPAYTNSFTRGVYYP DKVFRSSVLHSTQDLFLPFFSNVTWFHAIHVSGTNGTKRFDNPVLPFNDG VYFASTEKSNIIRGWIFGTTLDSKTQSLLIVNNATNVVIKVCEFQFCNDP FL GVYYHKNNKSWMESEFRVYSSANNCTFEYVSQPFLMDLEGKQGNFKNL REFVFKNIDGYFKIYSKHTPINLVRDLPQGFSALEPLVDLPIGINITRFQ TLL ALHRSYLTPGDSSSGWTAGAAAYYVGYLQPRTFLLKYNENGTITDAVDC ALDPLSETKCTLGSGGGGESQVRQQFSKDIEKLLNEQVNKEMQSSNLYMS MSSWCYTHSLDGAGLFLFDHAAEEYEHAKKLIIFLNENNVPVQLTSISAP E HKFEGLTQIFQKAYEHEQHISESINNIVDHAIKSKDHATFNFLQWYVAEQ H EEEVLFKDILDKIELIGNENHGLYLADQYVKGIAKSRKSGS | 136 |
| RBD-NTD-Ferr with 57 + 58 mut | pCoV147 | His8-3c-RBD-F490A-518LLH to NKS-GSGGSG-NTD-SSQC-Ferrritin | 694 | HHHHHHHHGPLEVLFQGPNITNLCPFGEVFNATRFASVYAWNRKRISNCV ADYSVLYNSASFSTFKCYGVSPTKLNDLCFTNVYADSFVIRGDEVRQIAP GQTGKIADYNYKLPDDFTGCVIAWNSNNLDSKVGGNYNYLYRLFRKSNL KPFERDISTEIYQAGSTPCNGVEGFNCYAPLQSYGFQPTNGVGYQPYRVV VLSFENKSAPATVCGPGSGGSGSSQCVNLTTRTQLPPAYTNSFTRGVYYP DKVFRSSVLHSTQDLFLPFFSNVTWFHAIHVSGTNGTKRFDNPVLPFNDG VYFASTEKSNIIRGWIFGTTLDSKTQSLLIVNNATNVVIKVCEFQFCNDP FL GVYYHKNNKSWMESEFRVYSSANNCTFEYVSQPFLMDLEGKQGNFKNL REFVFKNIDGYFKIYSKHTPINLVRDLPQGFSALEPLVDLPIGINITRFQ TLL ALHRSYLTPGDSSSGWTAGAAAYYVGYLQPRTFLLKYNENGTITDAVDC ALDPLSETKCTLGSGGGGESQVRQQFSKDIEKLLNEQVNKEMQSSNLYMS MSSWCYTHSLDGAGLFLFDHAAEEYEHAKKLIIFLNENNVPVQLTSISAP E HKFEGLTQIFQKAYEHEQHISESINNIVDHAIKSKDHATFNFLQWYVAEQ H EEEVLFKDILDKIELIGNENHGLYLADQYVKGIAKSRKSGS | 137 |
| 111 with 58 mut | pCoV151 | S1-SSQC-T676-GG-SQSIIAYT696-518LLH to 518 NKS-Ferritin | 856 | SSQCVNLTTRTQLPPAYTNSFTRGVYYPDKVFRSSVLHSTQDLFLPFFSN V TWFHAIHVSGTNGTKRFDNPVLPFNDGVYFASTEKSNIIRGWIFGTTLDS K TQSLLIVNNATNVVIKVCEFQFCNDPFLGVYYHKNNKSWMESEFRVYSSA NNCTFEYVSQPFLMDLEGKQGNFKNLREFVFKNIDGYFKIYSKHTPINLV R DLPQGFSALEPLVDLPIGINITRFQTLLALHRSYLTPGDSSSGWTAGAAA Y YVGYLQPRTFLLKYNENGTITDAVDCALDPLSETKCTLKSFTVEKGIYQT S NFRVQPTESIVRFPNITNLCPFGEVFNATRFASVYAWNRKRISNCVADYS V LYNSASFSTFKCYGVSPTKLNDLCFTNVYADSFVIRGDEVRQIAPGQTGK I ADYNYKLPDDFTGCVIAWNSNNLDSKVGGNYNYLYRLFRKSNLKPFERD ISTEIYQAGSTPCNGVEGFNCYFPLQSYGFQPTNGVGYQPYRVVVLSFEN K SAPATVCGPKKSTNLVKNKCVNFNFNGLTGTGVLTESNKKFLPFQQFGRD IADTTDAVRDPQTLEILDITPCSFGGVSVITPGTNTSNQVAVLYQDVNCT E VPVAIHADQLTPTWRVYSTGSNVFQTRAGCLIGAEHVNNSYECDIPIGAG I CASYQTGGSQSIIAYTGSGGGGESQVRQQFSKDIEKLLNEQVNKEMQSSN LYMSMSSWCYTHSLDGAGLFLFDHAAEEYEHAKKLIIFLNENNVPVQLTS ISAPEHKFEGLTQIFQKAYEHEQHISESINNIVDHAIKSKDHATFNFLQW YV AEQHEEEVLFKDILDKIELIGNENHGLYLADQYVKGIAKSRKSGS | 138 |
| 111 with 50 + 58 mut | pCoV152 | S1-SSQC-T676-GG-SQSIIAYT696 L455R/Y449K/F490R-518LLH to 518 NKS-Ferritin | 856 | SSQCVNLTTRTQLPPAYTNSFTRGVYYPDKVFRSSVLHSTQDLFLPFFSN V TWFHAIHVSGTNGTKRFDNPVLPFNDGVYFASTEKSNIIRGWIFGTTLDS K TQSLLIVNNATNVVIKVCEFQFCNDPFLGVYYHKNNKSWMESEFRVYSSA NNCTFEYVSQPFLMDLEGKQGNFKNLREFVFKNIDGYFKIYSKHTPINLV R DLPQGFSALEPLVDLPIGINITRFQTLLALHRSYLTPGDSSSGWTAGAAA Y YVGYLQPRTFLLKYNENGTITDAVDCALDPLSETKCTLKSFTVEKGIYQT S NFRVQPTESIVRFPNITNLCPFGEVFNATRFASVYAWNRKRISNCVADYS V LYNSASFSTFKCYGVSPTKLNDLCFTNVYADSFVIRGDEVRQIAPGQTGK I ADYNYKLPDDFTGCVIAWNSNNLDSKVGGNKNYLYRRFRKSNLKPFERD ISTEIYQAGSTPCNGVEGFNCYRPLQSYGFQPTNGVGYQPYRVVVLSFEN KSAPATVCGPKKSTNLVKNKCVNFNFNGLTGTGVLTESNKKFLPFQQFGR DIADTTDAVRDPQTLEILDITPCSFGGVSVITPGTNTSNQVAVLYQDVNC T EVPVAIHADQLTPTWRVYSTGSNVFQTRAGCLIGAEHVNNSYECDIPIGA GICASYQTGGSQSIIAYTGSGGGGESQVRQQFSKDIEKLLNEQVNKEMQS S NLYMSMSSWCYTHSLDGAGLFLFDHAAEEYEHAKKLIIFLNENNVPVQL TSISAPEHKFEGLTQIFQKAYEHEQHISESINNIVDHAIKSKDHATFNFL QW YVAEQHEEEVLFKDILDKIELIGNENHGLYLADQYVKGIAKSRKSGS | 139 |
| 111 with 57 + 58 mut | pCoV153 | S1-SSQC-T676-GG-SQSIIAYT696 -F490A-518LLH to 518 NKS-Ferritin | 856 | SSQCVNLTTRTQLPPAYTNSFTRGVYYPDKVFRSSVLHSTQDLFLPFFSN V TWFHAIHVSGTNGTKRFDNPVLPFNDGVYFASTEKSNIIRGWIFGTTLDS K TQSLLIVNNATNVVIKVCEFQFCNDPFLGVYYHKNNKSWMESEFRVYSSA NNCTFEYVSQPFLMDLEGKQGNFKNLREFVFKNIDGYFKIYSKHTPINLV R DLPQGFSALEPLVDLPIGINITRFQTLLALHRSYLTPGDSSSGWTAGAAA Y YVGYLQPRTFLLKYNENGTITDAVDCALDPLSETKCTLKSFTVEKGIYQT S NFRVQPTESIVRFPNITNLCPFGEVFNATRFASVYAWNRKRISNCVADYS V LYNSASFSTFKCYGVSPTKLNDLCFTNVYADSFVIRGDEVRQIAPGQTGK I ADYNYKLPDDFTGCVIAWNSNNLDSKVGGNYNYLYRLFRKSNLKPFERD ISTEIYQAGSTPCNGVEGFNCYAPLQSYGFQPTNGVGYQPYRVVVLSFEN KSAPATVCGPKKSTNLVKNKCVNFNFNGLTGTGVLTESNKKFLPFQQFGR DIADTTDAVRDPQTLEILDITPCSFGGVSVITPGTNTSNQVAVLYQDVNC T EVPVAIHADQLTPTWRVYSTGSNVFQTRAGCLIGAEHVNNSYECDIPIGA GICASYQTGGSQSIIAYTGSGGGGESQVRQQFSKDIEKLLNEQVNKEMQS S NLYMSMSSWCYTHSLDGAGLFLFDHAAEEYEHAKKLIIFLNENNVPVQL TSISAPEHKFEGLTQIFQKAYEHEQHISESINNIVDHAIKSKDHATFNFL QW YVAEQHEEEVLFKDILDKIELIGNENHGLYLADQYVKGIAKSRKSGS | 140 |
| NTD-RBD-Ferr with 57 + 58 mut | pCoV154 | His8-3c-NTD-RBD-F490A-518LLH to NKS-Ferritin | 694 | HHHHHHHHGPLEVLFQGPSSQCVNLTTRTQLPPAYTNSFTRGVYYPDKVF RSSVLHSTQDLFLPFFSNVTWFHAIHVSGTNGTKRFDNPVLPFNDGVYFA S TEKSNIIRGWIFGTTLDSKTQSLLIVNNATNVVIKVCEFQFCNDPFLGVY Y HKNNKSWMESEFRVYSSANNCTFEYVSQPFLMDLEGKQGNFKNLREFVF KNIDGYFKIYSKHTPINLVRDLPQGFSALEPLVDLPIGINITRFQTLLAL HRS YLTPGDSSSGWTAGAAAYYVGYLQPRTFLLKYNENGTITDAVDCALDPL SETKCTLGSGGSGNITNLCPFGEVFNATRFASVYAWNRKRISNCVADYSV LYNSASFSTFKCYGVSPTKLNDLCFTNVYADSFVIRGDEVRQIAPGQTGK I ADYNYKLPDDFTGCVIAWNSNNLDSKVGGNYNYLYRLFRKSNLKPFERD ISTEIYQAGSTPCNGVEGFNCYAPLQSYGFQPTNGVGYQPYRVVVLSFEN KSAPATVCGPGSGGGGESQVRQQFSKDIEKLLNEQVNKEMQSSNLYMSM SSWCYTHSLDGAGLFLFDHAAEEYEHAKKLIIFLNENNVPVQLTSISAPE H KFEGLTQIFQKAYEHEQHISESINNIVDHAIKSKDHATFNFLQWYVAEQH E EEVLFKDILDKIELIGNENHGLYLADQYVKGIAKSRKSGS | 141 |
| NTD-RBD-Ferr with 53 + 58 mut | pCoV155 | His8-3c-NTD-RBD-Y453R-518LLH to NKS-Ferritin | 694 | HHHHHHHHGPLEVLFQGPSSQCVNLTTRTQLPPAYTNSFTRGVYYPDKVF RSSVLHSTQDLFLPFFSNVTWFHAIHVSGTNGTKRFDNPVLPFNDGVYFA S TEKSNIIRGWIFGTTLDSKTQSLLIVNNATNVVIKVCEFQFCNDPFLGVY Y HKNNKSWMESEFRVYSSANNCTFEYVSQPFLMDLEGKQGNFKNLREFVF KNIDGYFKIYSKHTPINLVRDLPQGFSALEPLVDLPIGINITRFQTLLAL HRS YLTPGDSSSGWTAGAAAYYVGYLQPRTFLLKYNENGTITDAVDCALDPL SETKCTLGSGGSGNITNLCPFGEVFNATRFASVYAWNRKRISNCVADYSV LYNSASFSTFKCYGVSPTKLNDLCFTNVYADSFVIRGDEVRQIAPGQTGK I ADYNYKLPDDFTGCVIAWNSNNLDSKVGGNYNYLYRLFRKSNLKPFERD ISTEIYQAGSTPCNGVEGFNCYFPLQSYGFQPTNGVGYQPYRVVVLSFEL L HAPATVCGPGSGGGGESQVRQQFSKDIEKLLNEQVNKEMQSSNLYMSMS SWCYTHSLDGAGLFLFDHAAEEYEHAKKLIIFLNENNVPVQLTSISAPEH K FEGLTQIFQKAYEHEQHISESINNIVDHAIKSKDHATFNFLQWYVAEQHE E EVLFKDILDKIELIGNENHGLYLADQYVKGIAKSRKSGS | 142 |
| 111 with 50 mut | pCoV156 | S1-SSQC-T676-GG-SQSIIAYT696 -L455R/Y449K /F490R-Ferritin | 856 | SSQCVNLTTRTQLPPAYTNSFTRGVYYPDKVFRSSVLHSTQDLFLPFFSN V TWFHAIHVSGTNGTKRFDNPVLPFNDGVYFASTEKSNIIRGWIFGTTLDS K TQSLLIVNNATNVVIKVCEFQFCNDPFLGVYYHKNNKSWMESEFRVYSSA NNCTFEYVSQPFLMDLEGKQGNFKNLREFVFKNIDGYFKIYSKHTPINLV R DLPQGFSALEPLVDLPIGINITRFQTLLALHRSYLTPGDSSSGWTAGAAA Y YVGYLQPRTFLLKYNENGTITDAVDCALDPLSETKCTLKSFTVEKGIYQT S NFRVQPTESIVRFPNITNLCPFGEVFNATRFASVYAWNRKRISNCVADYS V LYNSASFSTFKCYGVSPTKLNDLCFTNVYADSFVIRGDEVRQIAPGQTGK I ADYNYKLPDDFTGCVIAWNSNNLDSKVGGNKNYLYRRFRKSNLKPFERD ISTEIYQAGSTPCNGVEGFNCYRPLQSYGFQPTNGVGYQPYRVVVLSFEL L HAPATVCGPKKSTNLVKNKCVNFNFNGLTGTGVLTESNKKFLPFQQFGR DIADTTDAVRDPQTLEILDITPCSFGGVSVITPGTNTSNQVAVLYQDVNC T EVPVAIHADQLTPTWRVYSTGSNVFQTRAGCLIGAEHVNNSYECDIPIGA GICASYQTGGSQSIIAYTGSGGGGESQVRQQFSKDIEKLLNEQVNKEMQS S NLYMSMSSWCYTHSLDGAGLFLFDHAAEEYEHAKKLIIFLNENNVPVQL TSISAPEHKFEGLTQIFQKAYEHEQHISESINNIVDHAIKSKDHATFNFL QW YVAEQHEEEVLFKDILDKIELIGNENHGLYLADQYVKGIAKSRKSGS | 143 |
| 1B-06-PL with D614G | pCoV159 | PL-S2P.1158op1-del-Ferritin-D614G (aka 1B-06-PL with D614G) | 1,318 | SSQCVNLTTRTQLPPAYTNSFTRGVYYPDKVFRSSVLHSTQDLFLPFFSN V TWFHAIHVSGTNGTKRFDNPVLPFNDGVYFASTEKSNIIRGWIFGTTLDS K TQSLLIVNNATNVVIKVCEFQFCNDPFLGVYYHKNNKSWMESEFRVYSSA NNCTFEYVSQPFLMDLEGKQGNFKNLREFVFKNIDGYFKIYSKHTPINLV R DLPQGFSALEPLVDLPIGINITRFQTLLALHRSYLTPGDSSSGWTAGAAA Y YVGYLQPRTFLLKYNENGTITDAVDCALDPLSETKCTLKSFTVEKGIYQT S NFRVQPTESIVRFPNITNLCPFGEVFNATRFASVYAWNRKRISNCVADYS V LYNSASFSTFKCYGVSPTKLNDLCFTNVYADSFVIRGDEVRQIAPGQTGK I ADYNYKLPDDFTGCVIAWNSNNLDSKVGGNYNYLYRLFRKSNLKPFERD ISTEIYQAGSTPCNGVEGFNCYFPLQSYGFQPTNGVGYQPYRVVVLSFEL L HAPATVCGPKKSTNLVKNKCVNFNFNGLTGTGVLTESNKKFLPFQQFGR DIADTTDAVRDPQTLEILDITPCSFGGVSVITPGTNTSNQVAVLYQGVNC T EVPVAIHADQLTPTWRVYSTGSNVFQTRAGCLIGAEHVNNSYECDIPIGA GICASYQTQTNSPGSASSVASQSIIAYTMSLGAENSVAYSNNSIAIPTNF TIS VTTEILPVSMTKTSVDCTMYICGDSTECSNLLLQYGSFCTQLNRALTGIA V EQDKNTQEVFAQVKQIYKTPPIKDFGGFNFSQILPDPSKPSKRSFIEDLL FN KVTLADAGFIKQYGDCLGDIAARDLICAQKFNGLTVLPPLLTDEMIAQYT SALLAGTITSGWTFGAGAALQIPFAMQMAYRFNGIGVTQNVLYENQKLIA NQFNSAIGKIQDSLSSTASALGKLQDVVNQNAQALNTLVKQLSSNFGAIS S VLNDILSRLDPPEAEVQIDRLITGRLQSLQTYVTQQLIRAAEIRASANLA AT KMSECVLGQSKRVDFCGKGYHLMSFPQSAPHGVVFLHVTYVPAQEKNFT TAPAICHDGKAHFPREGVFVSNGTHWFVTQRNFYEPQIITTDNTFVSGNC DVVIGIVNNTVYDPLQSELDSIKEELDKIHKNGSGGSGDIIKLLNEQVNK E MQSSNLYMSMSSWCYTHSLDGAGLFLFDHAAEEYEHAKKLIIFLNENNV PVQLTSISAPEHKFEGLTQIFQKAYEHEQHISESINNIVDHAIKSKDHAT FNF LQWYVAEQHEEEVLFKDILDKIELIGNENHGLYLADQYVKGIAKSRKSGS | 144 |
| Native spike leader, 1B-05 with DS1 | pCoV160 | S2P.1154_DS1-del-Ferritin (native leader) | 1,310 | VNLTTRTQLPPAYTNSFTRGVYYPDKVFRSSVLHSTQDLFLPFFSNVTWF HAIHVSGTNGTKRFDNPVLPFNDGVYFASTEKSNIIRGWIFGTTLDSKTQ S LLIVNNATNVVIKVCEFQFCNDPFLGVYYHKNNKSWMESEFRVYSSANN CTFEYVSQPFLMDLEGKQGNFKNLREFVFKNIDGYFKIYSKHTPINLVRD L PQGFSALEPLVDLPIGINITRFQTLLALHRSYLTPGDSSSGWTAGAAAYY V GYLQPRTFLLKYNENGTITDAVDCALDPLSETKCTLKSFTVEKGIYQTSN F RVQPTESIVRFPNITNLCPFGEVFNATRFASVYAWNRKRISNCVADYSVL Y NSASFSTFKCYGVCPTKLNDLCFTNVYADSFVIRGDEVRQIAPGQTGKIA D YNYKLPDDFTGCVIAWNSNNLDSKVGGNYNYLYRLFRKSNLKPFERDIST EIYQAGSTPCNGVEGFNCYFPLQSYGFQPTNGVGYQPYRVVVLSFELLHA PATVCGPKKSTNLVKNKCVNFNFNGLTGTGVLTESNKKFLPFQQFGRDIA DTTDAVRDPQTLEILDITPCSFGGVSVITPGTNTSNQVAVLYQDVNCTEV P VAIHADQLTPTWRVYSTGSNVFQTRAGCLIGAEHVNNSYECDIPIGAGIC A SYQTQTNSPGSASSVASQSIIAYTMSLGAENSVAYSNNSIAIPTNFTISV TTE ILPVSMTKTSVDCTMYICGDSTECSNLLLQYGSFCTQLNRALTGIAVEQD K NTQEVFAQVKQIYKTPPIKDFGGFNFSQILPDPSKPSKRSFIEDLLFNKV TL ADAGFIKQYGDCLGDIAARDLICAQKFNGLTVLPPLLTDEMIAQYTSALL AGTITSGWTFGAGAALQIPFAMQMAYRFNGIGVTQNVLYENQKLIANQF NSAIGKIQDSLSSTASALGKLQDVVNQNAQALNTLVKQLSSNFGAISSVL N DILSRLCPPEAEVQIDRLITGRLQSLQTYVTQQLIRAAEIRASANLAATK MS ECVLGQSKRVDFCGKGYHLMSFPQSAPHGVVFLHVTYVPAQEKNFTTAP AICHDGKAHFPREGVFVSNGTHWFVTQRNFYEPQIITTDNTFVSGNCDVV I GIVNNTVYDPLQPELDSFKEELDKGSGGSGDIIKLLNEQVNKEMQSSNLY MSMSSWCYTHSLDGAGLFLFDHAAEEYEHAKKLIIFLNENNVPVQLTSIS APEHKFEGLTQIFQKAYEHEQHISESINNIVDHAIKSKDHATFNFLQWYV A EQHEEEVLFKDILDKIELIGNENHGLYLADQYVKGIAKSRKSGS | 145 |
| 1B-06-PL with DS1 | pCoV161 | PL-S2P.1158op1_DS1-del-Ferritin | 1,318 | SSQCVNLTTRTQLPPAYTNSFTRGVYYPDKVFRSSVLHSTQDLFLPFFSN V TWFHAIHVSGTNGTKRFDNPVLPFNDGVYFASTEKSNIIRGWIFGTTLDS K TQSLLIVNNATNVVIKVCEFQFCNDPFLGVYYHKNNKSWMESEFRVYSSA NNCTFEYVSQPFLMDLEGKQGNFKNLREFVFKNIDGYFKIYSKHTPINLV R DLPQGFSALEPLVDLPIGINITRFQTLLALHRSYLTPGDSSSGWTAGAAA Y YVGYLQPRTFLLKYNENGTITDAVDCALDPLSETKCTLKSFTVEKGIYQT S NFRVQPTESIVRFPNITNLCPFGEVFNATRFASVYAWNRKRISNCVADYS V LYNSASFSTFKCYGVCPTKLNDLCFTNVYADSFVIRGDEVRQIAPGQTGK I ADYNYKLPDDFTGCVIAWNSNNLDSKVGGNYNYLYRLFRKSNLKPFERD ISTEIYQAGSTPCNGVEGFNCYFPLQSYGFQPTNGVGYQPYRVVVLSFEL L HAPATVCGPKKSTNLVKNKCVNFNFNGLTGTGVLTESNKKFLPFQQFGR DIADTTDAVRDPQTLEILDITPCSFGGVSVITPGTNTSNQVAVLYQDVNC T EVPVAIHADQLTPTWRVYSTGSNVFQTRAGCLIGAEHVNNSYECDIPIGA GICASYQTQTNSPGSASSVASQSIIAYTMSLGAENSVAYSNNSIAIPTNF TIS VTTEILPVSMTKTSVDCTMYICGDSTECSNLLLQYGSFCTQLNRALTGIA V EQDKNTQEVFAQVKQIYKTPPIKDFGGFNFSQILPDPSKPSKRSFIEDLL FN KVTLADAGFIKQYGDCLGDIAARDLICAQKFNGLTVLPPLLTDEMIAQYT SALLAGTITSGWTFGAGAALQIPFAMQMAYRFNGIGVTQNVLYENQKLIA NQFNSAIGKIQDSLSSTASALGKLQDVVNQNAQALNTLVKQLSSNFGAIS S VLNDILSRLCPPEAEVQIDRLITGRLQSLQTYVTQQLIRAAEIRASANLA AT KMSECVLGQSKRVDFCGKGYHLMSFPQSAPHGVVFLHVTYVPAQEKNFT TAPAICHDGKAHFPREGVFVSNGTHWFVTQRNFYEPQIITTDNTFVSGNC DVVIGIVNNTVYDPLQSELDSIKEELDKIHKNGSGGSGDIIKLLNEQVNK E MQSSNLYMSMSSWCYTHSLDGAGLFLFDHAAEEYEHAKKLIIFLNENNV PVQLTSISAPEHKFEGLTQIFQKAYEHEQHISESINNIVDHAIKSKDHAT FNF LQWYVAEQHEEEVLFKDILDKIELIGNENHGLYLADQYVKGIAKSRKSGS | 146 |
| 1B-06-PL SSQ removed (only C) | pCoV162 | PL-S2P.1158op1-del-Ferritin-C only (pref leader) | 1,315 | CVNLTTRTQLPPAYTNSFTRGVYYPDKVFRSSVLHSTQDLFLPFFSNVTW F HAIHVSGTNGTKRFDNPVLPFNDGVYFASTEKSNIIRGWIFGTTLDSKTQ S LLIVNNATNVVIKVCEFQFCNDPFLGVYYHKNNKSWMESEFRVYSSANN CTFEYVSQPFLMDLEGKQGNFKNLREFVFKNIDGYFKIYSKHTPINLVRD L PQGFSALEPLVDLPIGINITRFQTLLALHRSYLTPGDSSSGWTAGAAAYY V GYLQPRTFLLKYNENGTITDAVDCALDPLSETKCTLKSFTVEKGIYQTSN F RVQPTESIVRFPNITNLCPFGEVFNATRFASVYAWNRKRISNCVADYSVL Y NSASFSTFKCYGVSPTKLNDLCFTNVYADSFVIRGDEVRQIAPGQTGKIA D YNYKLPDDFTGCVIAWNSNNLDSKVGGNYNYLYRLFRKSNLKPFERDIST EIYQAGSTPCNGVEGFNCYFPLQSYGFQPTNGVGYQPYRVVVLSFELLHA PATVCGPKKSTNLVKNKCVNFNFNGLTGTGVLTESNKKFLPFQQFGRDIA DTTDAVRDPQTLEILDITPCSFGGVSVITPGTNTSNQVAVLYQDVNCTEV P VAIHADQLTPTWRVYSTGSNVFQTRAGCLIGAEHVNNSYECDIPIGAGIC A SYQTQTNSPGSASSVASQSIIAYTMSLGAENSVAYSNNSIAIPTNFTISV TTE ILPVSMTKTSVDCTMYICGDSTECSNLLLQYGSFCTQLNRALTGIAVEQD K NTQEVFAQVKQIYKTPPIKDFGGFNFSQILPDPSKPSKRSFIEDLLFNKV TL ADAGFIKQYGDCLGDIAARDLICAQKFNGLTVLPPLLTDEMIAQYTSALL AGTITSGWTFGAGAALQIPFAMQMAYRFNGIGVTQNVLYENQKLIANQF NSAIGKIQDSLSSTASALGKLQDVVNQNAQALNTLVKQLSSNFGAISSVL N DILSRLDPPEAEVQIDRLITGRLQSLQTYVTQQLIRAAEIRASANLAATK MS ECVLGQSKRVDFCGKGYHLMSFPQSAPHGVVFLHVTYVPAQEKNFTTAP AICHDGKAHFPREGVFVSNGTHWFVTQRNFYEPQIITTDNTFVSGNCDVV I GIVNNTVYDPLQSELDSIKEELDKIHKNGSGGSGDIIKLLNEQVNKEMQS S NLYMSMSSWCYTHSLDGAGLFLFDHAAEEYEHAKKLIIFLNENNVPVQL TSISAPEHKFEGLTQIFQKAYEHEQHISESINNIVDHAIKSKDHATFNFL QW YVAEQHEEEVLFKDILDKIELIGNENHGLYLADQYVKGIAKSRKSGS | 147 |
| 1B-06-PL ETGTQC (Weesler) | pCoV163 | PL-S2P.1158op1-del-Ferritin-ETGTQC only (pref leader) | 1,320 | ETGTQCVNLTTRTQLPPAYTNSFTRGVYYPDKVFRSSVLHSTQDLFLPFF S NVTWFHAIHVSGTNGTKRFDNPVLPFNDGVYFASTEKSNIIRGWIFGTTL D SKTQSLLIVNNATNVVIKVCEFQFCNDPFLGVYYHKNNKSWMESEFRVYS SANNCTFEYVSQPFLMDLEGKQGNFKNLREFVFKNIDGYFKIYSKHTPIN L VRDLPQGFSALEPLVDLPIGINITRFQTLLALHRSYLTPGDSSSGWTAGA A AYYVGYLQPRTFLLKYNENGTITDAVDCALDPLSETKCTLKSFTVEKGIY QTSNFRVQPTESIVRFPNITNLCPFGEVFNATRFASVYAWNRKRISNCVA D YSVLYNSASFSTFKCYGVSPTKLNDLCFTNVYADSFVIRGDEVRQIAPGQ T GKIADYNYKLPDDFTGCVIAWNSNNLDSKVGGNYNYLYRLFRKSNLKPF ERDISTEIYQAGSTPCNGVEGFNCYFPLQSYGFQPTNGVGYQPYRVVVLS F ELLHAPATVCGPKKSTNLVKNKCVNFNFNGLTGTGVLTESNKKFLPFQQF GRDIADTTDAVRDPQTLEILDITPCSFGGVSVITPGTNTSNQVAVLYQDV N CTEVPVAIHADQLTPTWRVYSTGSNVFQTRAGCLIGAEHVNNSYECDIPI G AGICASYQTQTNSPGSASSVASQSIIAYTMSLGAENSVAYSNNSIAIPTN FTI SVTTEILPVSMTKTSVDCTMYICGDSTECSNLLLQYGSFCTQLNRALTGI A VEQDKNTQEVFAQVKQIYKTPPIKDFGGFNFSQILPDPSKPSKRSFIEDL LF NKVTLADAGFIKQYGDCLGDIAARDLICAQKFNGLTVLPPLLTDEMIAQY TSALLAGTITSGWTFGAGAALQIPFAMQMAYRFNGIGVTQNVLYENQKLI ANQFNSAIGKIQDSLSSTASALGKLQDVVNQNAQALNTLVKQLSSNFGAI SSVLNDILSRLDPPEAEVQIDRLITGRLQSLQTYVTQQLIRAAEIRASAN LA ATKMSECVLGQSKRVDFCGKGYHLMSFPQSAPHGVVFLHVTYVPAQEK NFTTAPAICHDGKAHFPREGVFVSNGTHWFVTQRNFYEPQIITTDNTFVS G NCDVVIGIVNNTVYDPLQSELDSIKEELDKIHKNGSGGSGDIIKLLNEQV N KEMQSSNLYMSMSSWCYTHSLDGAGLFLFDHAAEEYEHAKKLIIFLNEN NVPVQLTSISAPEHKFEGLTQIFQKAYEHEQHISESINNIVDHAIKSKDH AT FNFLQWYVAEQHEEEVLFKDILDKIELIGNENHGLYLADQYVKGIAKSRK SGS | 148 |
| 1B-06-PL SDLDRC (SARS1) | pCoV164 | PL-S2P.1158op1-del-Ferritin-SDLDRC only (pref leader) | 1,320 | SDLDRCVNLTTRTQLPPAYTNSFTRGVYYPDKVFRSSVLHSTQDLFLPFF S NVTWFHAIHVSGTNGTKRFDNPVLPFNDGVYFASTEKSNIIRGWIFGTTL D SKTQSLLIVNNATNVVIKVCEFQFCNDPFLGVYYHKNNKSWMESEFRVYS SANNCTFEYVSQPFLMDLEGKQGNFKNLREFVFKNIDGYFKIYSKHTPIN L VRDLPQGFSALEPLVDLPIGINITRFQTLLALHRSYLTPGDSSSGWTAGA A AYYVGYLQPRTFLLKYNENGTITDAVDCALDPLSETKCTLKSFTVEKGIY QTSNFRVQPTESIVRFPNITNLCPFGEVFNATRFASVYAWNRKRISNCVA D YSVLYNSASFSTFKCYGVSPTKLNDLCFTNVYADSFVIRGDEVRQIAPGQ T GKIADYNYKLPDDFTGCVIAWNSNNLDSKVGGNYNYLYRLFRKSNLKPF ERDISTEIYQAGSTPCNGVEGFNCYFPLQSYGFQPTNGVGYQPYRVVVLS F ELLHAPATVCGPKKSTNLVKNKCVNFNFNGLTGTGVLTESNKKFLPFQQF GRDIADTTDAVRDPQTLEILDITPCSFGGVSVITPGTNTSNQVAVLYQDV N CTEVPVAIHADQLTPTWRVYSTGSNVFQTRAGCLIGAEHVNNSYECDIPI G AGICASYQTQTNSPGSASSVASQSIIAYTMSLGAENSVAYSNNSIAIPTN FTI SVTTEILPVSMTKTSVDCTMYICGDSTECSNLLLQYGSFCTQLNRALTGI A VEQDKNTQEVFAQVKQIYKTPPIKDFGGFNFSQILPDPSKPSKRSFIEDL LF NKVTLADAGFIKQYGDCLGDIAARDLICAQKFNGLTVLPPLLTDEMIAQY TSALLAGTITSGWTFGAGAALQIPFAMQMAYRFNGIGVTQNVLYENQKLI ANQFNSAIGKIQDSLSSTASALGKLQDVVNQNAQALNTLVKQLSSNFGAI SSVLNDILSRLDPPEAEVQIDRLITGRLQSLQTYVTQQLIRAAEIRASAN LA ATKMSECVLGQSKRVDFCGKGYHLMSFPQSAPHGVVFLHVTYVPAQEK NFTTAPAICHDGKAHFPREGVFVSNGTHWFVTQRNFYEPQIITTDNTFVS G NCDVVIGIVNNTVYDPLQSELDSIKEELDKIHKNGSGGSGDIIKLLNEQV N KEMQSSNLYMSMSSWCYTHSLDGAGLFLFDHAAEEYEHAKKLIIFLNEN NVPVQLTSISAPEHKFEGLTQIFQKAYEHEQHISESINNIVDHAIKSKDH AT FNFLQWYVAEQHEEEVLFKDILDKIELIGNENHGLYLADQYVKGIAKSRK SGS | 149 |
| 1B-06-PL reverted mutations | pCoV165 | PL-S2P.1158-del-Ferritin (revert mutations) | 1,318 | SSQCVNLTTRTQLPPAYTNSFTRGVYYPDKVFRSSVLHSTQDLFLPFFSN V TWFHAIHVSGTNGTKRFDNPVLPFNDGVYFASTEKSNIIRGWIFGTTLDS K TQSLLIVNNATNVVIKVCEFQFCNDPFLGVYYHKNNKSWMESEFRVYSSA NNCTFEYVSQPFLMDLEGKQGNFKNLREFVFKNIDGYFKIYSKHTPINLV R DLPQGFSALEPLVDLPIGINITRFQTLLALHRSYLTPGDSSSGWTAGAAA Y YVGYLQPRTFLLKYNENGTITDAVDCALDPLSETKCTLKSFTVEKGIYQT S NFRVQPTESIVRFPNITNLCPFGEVFNATRFASVYAWNRKRISNCVADYS V LYNSASFSTFKCYGVSPTKLNDLCFTNVYADSFVIRGDEVRQIAPGQTGK I ADYNYKLPDDFTGCVIAWNSNNLDSKVGGNYNYLYRLFRKSNLKPFERD ISTEIYQAGSTPCNGVEGFNCYFPLQSYGFQPTNGVGYQPYRVVVLSFEL L HAPATVCGPKKSTNLVKNKCVNFNFNGLTGTGVLTESNKKFLPFQQFGR DIADTTDAVRDPQTLEILDITPCSFGGVSVITPGTNTSNQVAVLYQDVNC T EVPVAIHADQLTPTWRVYSTGSNVFQTRAGCLIGAEHVNNSYECDIPIGA GICASYQTQTNSPGSASSVASQSIIAYTMSLGAENSVAYSNNSIAIPTNF TIS VTTEILPVSMTKTSVDCTMYICGDSTECSNLLLQYGSFCTQLNRALTGIA V EQDKNTQEVFAQVKQIYKTPPIKDFGGFNFSQILPDPSKPSKRSFIEDLL FN KVTLADAGFIKQYGDCLGDIAARDLICAQKFNGLTVLPPLLTDEMIAQYT SALLAGTITSGWTFGAGAALQIPFAMQMAYRFNGIGVTQNVLYENQKLIA NQFNSAIGKIQDSLSSTASALGKLQDVVNQNAQALNTLVKQLSSNFGAIS S VLNDILSRLDPPEAEVQIDRLITGRLQSLQTYVTQQLIRAAEIRASANLA AT KMSECVLGQSKRVDFCGKGYHLMSFPQSAPHGVVFLHVTYVPAQEKNFT TAPAICHDGKAHFPREGVFVSNGTHWFVTQRNFYEPQIITTDNTFVSGNC DVVIGIVNNTVYDPLQPELDSFKEELDKYFKNGSGGSGDIIKLLNEQVNK E MQSSNLYMSMSSWCYTHSLDGAGLFLFDHAAEEYEHAKKLIIFLNENNV PVQLTSISAPEHKFEGLTQIFQKAYEHEQHISESINNIVDHAIKSKDHAT FNF LQWYVAEQHEEEVLFKDILDKIELIGNENHGLYLADQYVKGIAKSRKSGS | 150 |
| 1B-06-PL some reverted mut | pCoV166 | PL-S2P.1158_F11 48I-del-Ferritin | 1,318 | SSQCVNLTTRTQLPPAYTNSFTRGVYYPDKVFRSSVLHSTQDLFLPFFSN V TWFHAIHVSGTNGTKRFDNPVLPFNDGVYFASTEKSNIIRGWIFGTTLDS K TQSLLIVNNATNVVIKVCEFQFCNDPFLGVYYHKNNKSWMESEFRVYSSA NNCTFEYVSQPFLMDLEGKQGNFKNLREFVFKNIDGYFKIYSKHTPINLV R DLPQGFSALEPLVDLPIGINITRFQTLLALHRSYLTPGDSSSGWTAGAAA Y YVGYLQPRTFLLKYNENGTITDAVDCALDPLSETKCTLKSFTVEKGIYQT S NFRVQPTESIVRFPNITNLCPFGEVFNATRFASVYAWNRKRISNCVADYS V LYNSASFSTFKCYGVSPTKLNDLCFTNVYADSFVIRGDEVRQIAPGQTGK I ADYNYKLPDDFTGCVIAWNSNNLDSKVGGNYNYLYRLFRKSNLKPFERD ISTEIYQAGSTPCNGVEGFNCYFPLQSYGFQPTNGVGYQPYRVVVLSFEL L HAPATVCGPKKSTNLVKNKCVNFNFNGLTGTGVLTESNKKFLPFQQFGR DIADTTDAVRDPQTLEILDITPCSFGGVSVITPGTNTSNQVAVLYQDVNC T EVPVAIHADQLTPTWRVYSTGSNVFQTRAGCLIGAEHVNNSYECDIPIGA GICASYQTQTNSPGSASSVASQSIIAYTMSLGAENSVAYSNNSIAIPTNF TIS VTTEILPVSMTKTSVDCTMYICGDSTECSNLLLQYGSFCTQLNRALTGIA V EQDKNTQEVFAQVKQIYKTPPIKDFGGFNFSQILPDPSKPSKRSFIEDLL FN KVTLADAGFIKQYGDCLGDIAARDLICAQKFNGLTVLPPLLTDEMIAQYT SALLAGTITSGWTFGAGAALQIPFAMQMAYRFNGIGVTQNVLYENQKLIA NQFNSAIGKIQDSLSSTASALGKLQDVVNQNAQALNTLVKQLSSNFGAIS S VLNDILSRLDPPEAEVQIDRLITGRLQSLQTYVTQQLIRAAEIRASANLA AT KMSECVLGQSKRVDFCGKGYHLMSFPQSAPHGVVFLHVTYVPAQEKNFT TAPAICHDGKAHFPREGVFVSNGTHWFVTQRNFYEPQIITTDNTFVSGNC DVVIGIVNNTVYDPLQPELDSIKEELDKYFKNGSGGSGDIIKLLNEQVNK E MQSSNLYMSMSSWCYTHSLDGAGLFLFDHAAEEYEHAKKLIIFLNENNV PVQLTSISAPEHKFEGLTQIFQKAYEHEQHISESINNIVDHAIKSKDHAT FNF LQWYVAEQHEEEVLFKDILDKIELIGNENHGLYLADQYVKGIAKSRKSGS | 151 |
| 1B-06-PL with 1143 reverted to P | pCoV167 | PL-S2P.1158-del-Ferritin (revert P1143S)-F1148I/Y1155I/F1156H | 1,318 | SSQCVNLTTRTQLPPAYTNSFTRGVYYPDKVFRSSVLHSTQDLFLPFFSN V TWFHAIHVSGTNGTKRFDNPVLPFNDGVYFASTEKSNIIRGWIFGTTLDS K TQSLLIVNNATNVVIKVCEFQFCNDPFLGVYYHKNNKSWMESEFRVYSSA NNCTFEYVSQPFLMDLEGKQGNFKNLREFVFKNIDGYFKIYSKHTPINLV R DLPQGFSALEPLVDLPIGINITRFQTLLALHRSYLTPGDSSSGWTAGAAA Y YVGYLQPRTFLLKYNENGTITDAVDCALDPLSETKCTLKSFTVEKGIYQT S NFRVQPTESIVRFPNITNLCPFGEVFNATRFASVYAWNRKRISNCVADYS V LYNSASFSTFKCYGVSPTKLNDLCFTNVYADSFVIRGDEVRQIAPGQTGK I ADYNYKLPDDFTGCVIAWNSNNLDSKVGGNYNYLYRLFRKSNLKPFERD ISTEIYQAGSTPCNGVEGFNCYFPLQSYGFQPTNGVGYQPYRVVVLSFEL L HAPATVCGPKKSTNLVKNKCVNFNFNGLTGTGVLTESNKKFLPFQQFGR DIADTTDAVRDPQTLEILDITPCSFGGVSVITPGTNTSNQVAVLYQDVNC T EVPVAIHADQLTPTWRVYSTGSNVFQTRAGCLIGAEHVNNSYECDIPIGA GICASYQTQTNSPGSASSVASQSIIAYTMSLGAENSVAYSNNSIAIPTNF TIS VTTEILPVSMTKTSVDCTMYICGDSTECSNLLLQYGSFCTQLNRALTGIA V EQDKNTQEVFAQVKQIYKTPPIKDFGGFNFSQILPDPSKPSKRSFIEDLL FN KVTLADAGFIKQYGDCLGDIAARDLICAQKFNGLTVLPPLLTDEMIAQYT SALLAGTITSGWTFGAGAALQIPFAMQMAYRFNGIGVTQNVLYENQKLIA NQFNSAIGKIQDSLSSTASALGKLQDVVNQNAQALNTLVKQLSSNFGAIS S VLNDILSRLDPPEAEVQIDRLITGRLQSLQTYVTQQLIRAAEIRASANLA AT KMSECVLGQSKRVDFCGKGYHLMSFPQSAPHGVVFLHVTYVPAQEKNFT TAPAICHDGKAHFPREGVFVSNGTHWFVTQRNFYEPQIITTDNTFVSGNC DVVIGIVNNTVYDPLQPELDSIKEELDKIHKNGSGGSGDIIKLLNEQVNK E MQSSNLYMSMSSWCYTHSLDGAGLFLFDHAAEEYEHAKKLIIFLNENNV PVQLTSISAPEHKFEGLTQIFQKAYEHEQHISESINNIVDHAIKSKDHAT FNF LQWYVAEQHEEEVLFKDILDKIELIGNENHGLYLADQYVKGIAKSRKSGS | 152 |
| 1B-06-PL removed last residue | pCoV168 | PL-S2P.1157-del-Ferritin | 1,317 | SSQCVNLTTRTQLPPAYTNSFTRGVYYPDKVFRSSVLHSTQDLFLPFFSN V TWFHAIHVSGTNGTKRFDNPVLPFNDGVYFASTEKSNIIRGWIFGTTLDS K TQSLLIVNNATNVVIKVCEFQFCNDPFLGVYYHKNNKSWMESEFRVYSSA NNCTFEYVSQPFLMDLEGKQGNFKNLREFVFKNIDGYFKIYSKHTPINLV R DLPQGFSALEPLVDLPIGINITRFQTLLALHRSYLTPGDSSSGWTAGAAA Y YVGYLQPRTFLLKYNENGTITDAVDCALDPLSETKCTLKSFTVEKGIYQT S NFRVQPTESIVRFPNITNLCPFGEVFNATRFASVYAWNRKRISNCVADYS V LYNSASFSTFKCYGVSPTKLNDLCFTNVYADSFVIRGDEVRQIAPGQTGK I ADYNYKLPDDFTGCVIAWNSNNLDSKVGGNYNYLYRLFRKSNLKPFERD ISTEIYQAGSTPCNGVEGFNCYFPLQSYGFQPTNGVGYQPYRVVVLSFEL L HAPATVCGPKKSTNLVKNKCVNFNFNGLTGTGVLTESNKKFLPFQQFGR DIADTTDAVRDPQTLEILDITPCSFGGVSVITPGTNTSNQVAVLYQDVNC T EVPVAIHADQLTPTWRVYSTGSNVFQTRAGCLIGAEHVNNSYECDIPIGA GICASYQTQTNSPGSASSVASQSIIAYTMSLGAENSVAYSNNSIAIPTNF TIS VTTEILPVSMTKTSVDCTMYICGDSTECSNLLLQYGSFCTQLNRALTGIA V EQDKNTQEVFAQVKQIYKTPPIKDFGGFNFSQILPDPSKPSKRSFIEDLL FN KVTLADAGFIKQYGDCLGDIAARDLICAQKFNGLTVLPPLLTDEMIAQYT SALLAGTITSGWTFGAGAALQIPFAMQMAYRFNGIGVTQNVLYENQKLIA NQFNSAIGKIQDSLSSTASALGKLQDVVNQNAQALNTLVKQLSSNFGAIS S VLNDILSRLDPPEAEVQIDRLITGRLQSLQTYVTQQLIRAAEIRASANLA AT KMSECVLGQSKRVDFCGKGYHLMSFPQSAPHGVVFLHVTYVPAQEKNFT TAPAICHDGKAHFPREGVFVSNGTHWFVTQRNFYEPQIITTDNTFVSGNC DVVIGIVNNTVYDPLQPELDSFKEELDKYFKGSGGSGDIIKLLNEQVNKE M QSSNLYMSMSSWCYTHSLDGAGLFLFDHAAEEYEHAKKLIIFLNENNVPV QLTSISAPEHKFEGLTQIFQKAYEHEQHISESINNIVDHAIKSKDHATFN FL QWYVAEQHEEEVLFKDILDKIELIGNENHGLYLADQYVKGIAKSRKSGS | 153 |
| 1B-06-PL added H at the end | pCoV169 | PL-S2P.1159-del-Ferritin | 1,319 | SSQCVNLTTRTQLPPAYTNSFTRGVYYPDKVFRSSVLHSTQDLFLPFFSN V TWFHAIHVSGTNGTKRFDNPVLPFNDGVYFASTEKSNIIRGWIFGTTLDS K TQSLLIVNNATNVVIKVCEFQFCNDPFLGVYYHKNNKSWMESEFRVYSSA NNCTFEYVSQPFLMDLEGKQGNFKNLREFVFKNIDGYFKIYSKHTPINLV R DLPQGFSALEPLVDLPIGINITRFQTLLALHRSYLTPGDSSSGWTAGAAA Y YVGYLQPRTFLLKYNENGTITDAVDCALDPLSETKCTLKSFTVEKGIYQT S NFRVQPTESIVRFPNITNLCPFGEVFNATRFASVYAWNRKRISNCVADYS V LYNSASFSTFKCYGVSPTKLNDLCFTNVYADSFVIRGDEVRQIAPGQTGK I ADYNYKLPDDFTGCVIAWNSNNLDSKVGGNYNYLYRLFRKSNLKPFERD ISTEIYQAGSTPCNGVEGFNCYFPLQSYGFQPTNGVGYQPYRVVVLSFEL L HAPATVCGPKKSTNLVKNKCVNFNFNGLTGTGVLTESNKKFLPFQQFGR DIADTTDAVRDPQTLEILDITPCSFGGVSVITPGTNTSNQVAVLYQDVNC T EVPVAIHADQLTPTWRVYSTGSNVFQTRAGCLIGAEHVNNSYECDIPIGA GICASYQTQTNSPGSASSVASQSIIAYTMSLGAENSVAYSNNSIAIPTNF TIS VTTEILPVSMTKTSVDCTMYICGDSTECSNLLLQYGSFCTQLNRALTGIA V EQDKNTQEVFAQVKQIYKTPPIKDFGGFNFSQILPDPSKPSKRSFIEDLL FN KVTLADAGFIKQYGDCLGDIAARDLICAQKFNGLTVLPPLLTDEMIAQYT SALLAGTITSGWTFGAGAALQIPFAMQMAYRFNGIGVTQNVLYENQKLIA NQFNSAIGKIQDSLSSTASALGKLQDVVNQNAQALNTLVKQLSSNFGAIS S VLNDILSRLDPPEAEVQIDRLITGRLQSLQTYVTQQLIRAAEIRASANLA AT KMSECVLGQSKRVDFCGKGYHLMSFPQSAPHGVVFLHVTYVPAQEKNFT TAPAICHDGKAHFPREGVFVSNGTHWFVTQRNFYEPQIITTDNTFVSGNC DVVIGIVNNTVYDPLQPELDSFKEELDKYFKNHGSGGSGDIIKLLNEQVN K EMQSSNLYMSMSSWCYTHSLDGAGLFLFDHAAEEYEHAKKLIIFLNENN VPVQLTSISAPEHKFEGLTQIFQKAYEHEQHISESINNIVDHAIKSKDHA TF NFLQWYVAEQHEEEVLFKDILDKIELIGNENHGLYLADQYVKGIAKSRKS GS | 154 |
| 1B-06-PL added HT at the end | pCoV170 | PL-S2P.1160-del-Ferritin | 1,320 | SSQCVNLTTRTQLPPAYTNSFTRGVYYPDKVFRSSVLHSTQDLFLPFFSN V TWFHAIHVSGTNGTKRFDNPVLPFNDGVYFASTEKSNIIRGWIFGTTLDS K TQSLLIVNNATNVVIKVCEFQFCNDPFLGVYYHKNNKSWMESEFRVYSSA NNCTFEYVSQPFLMDLEGKQGNFKNLREFVFKNIDGYFKIYSKHTPINLV R DLPQGFSALEPLVDLPIGINITRFQTLLALHRSYLTPGDSSSGWTAGAAA Y YVGYLQPRTFLLKYNENGTITDAVDCALDPLSETKCTLKSFTVEKGIYQT S NFRVQPTESIVRFPNITNLCPFGEVFNATRFASVYAWNRKRISNCVADYS V LYNSASFSTFKCYGVSPTKLNDLCFTNVYADSFVIRGDEVRQIAPGQTGK I ADYNYKLPDDFTGCVIAWNSNNLDSKVGGNYNYLYRLFRKSNLKPFERD ISTEIYQAGSTPCNGVEGFNCYFPLQSYGFQPTNGVGYQPYRVVVLSFEL L HAPATVCGPKKSTNLVKNKCVNFNFNGLTGTGVLTESNKKFLPFQQFGR DIADTTDAVRDPQTLEILDITPCSFGGVSVITPGTNTSNQVAVLYQDVNC T EVPVAIHADQLTPTWRVYSTGSNVFQTRAGCLIGAEHVNNSYECDIPIGA GICASYQTQTNSPGSASSVASQSIIAYTMSLGAENSVAYSNNSIAIPTNF TIS VTTEILPVSMTKTSVDCTMYICGDSTECSNLLLQYGSFCTQLNRALTGIA V EQDKNTQEVFAQVKQIYKTPPIKDFGGFNFSQILPDPSKPSKRSFIEDLL FN KVTLADAGFIKQYGDCLGDIAARDLICAQKFNGLTVLPPLLTDEMIAQYT SALLAGTITSGWTFGAGAALQIPFAMQMAYRFNGIGVTQNVLYENQKLIA NQFNSAIGKIQDSLSSTASALGKLQDVVNQNAQALNTLVKQLSSNFGAIS S VLNDILSRLDPPEAEVQIDRLITGRLQSLQTYVTQQLIRAAEIRASANLA AT KMSECVLGQSKRVDFCGKGYHLMSFPQSAPHGVVFLHVTYVPAQEKNFT TAPAICHDGKAHFPREGVFVSNGTHWFVTQRNFYEPQIITTDNTFVSGNC DVVIGIVNNTVYDPLQPELDSFKEELDKYFKNHTGSGGSGDIIKLLNEQV N KEMQSSNLYMSMSSWCYTHSLDGAGLFLFDHAAEEYEHAKKLIIFLNEN NVPVQLTSISAPEHKFEGLTQIFQKAYEHEQHISESINNIVDHAIKSKDH AT FNFLQWYVAEQHEEEVLFKDILDKIELIGNENHGLYLADQYVKGIAKSRK SGS | 155 |
| 1B-06-PL combo | pCoV171 | PL-S2P.1157op1-del-Ferritin (revert P1143S)-F1148I/Y1155I/F1156H | 1,317 | SSQCVNLTTRTQLPPAYTNSFTRGVYYPDKVFRSSVLHSTQDLFLPFFSN V TWFHAIHVSGTNGTKRFDNPVLPFNDGVYFASTEKSNIIRGWIFGTTLDS K TQSLLIVNNATNVVIKVCEFQFCNDPFLGVYYHKNNKSWMESEFRVYSSA NNCTFEYVSQPFLMDLEGKQGNFKNLREFVFKNIDGYFKIYSKHTPINLV R DLPQGFSALEPLVDLPIGINITRFQTLLALHRSYLTPGDSSSGWTAGAAA Y YVGYLQPRTFLLKYNENGTITDAVDCALDPLSETKCTLKSFTVEKGIYQT S NFRVQPTESIVRFPNITNLCPFGEVFNATRFASVYAWNRKRISNCVADYS V LYNSASFSTFKCYGVSPTKLNDLCFTNVYADSFVIRGDEVRQIAPGQTGK I ADYNYKLPDDFTGCVIAWNSNNLDSKVGGNYNYLYRLFRKSNLKPFERD ISTEIYQAGSTPCNGVEGFNCYFPLQSYGFQPTNGVGYQPYRVVVLSFEL L HAPATVCGPKKSTNLVKNKCVNFNFNGLTGTGVLTESNKKFLPFQQFGR DIADTTDAVRDPQTLEILDITPCSFGGVSVITPGTNTSNQVAVLYQDVNC T EVPVAIHADQLTPTWRVYSTGSNVFQTRAGCLIGAEHVNNSYECDIPIGA GICASYQTQTNSPGSASSVASQSIIAYTMSLGAENSVAYSNNSIAIPTNF TIS VTTEILPVSMTKTSVDCTMYICGDSTECSNLLLQYGSFCTQLNRALTGIA V EQDKNTQEVFAQVKQIYKTPPIKDFGGFNFSQILPDPSKPSKRSFIEDLL FN KVTLADAGFIKQYGDCLGDIAARDLICAQKFNGLTVLPPLLTDEMIAQYT SALLAGTITSGWTFGAGAALQIPFAMQMAYRFNGIGVTQNVLYENQKLIA NQFNSAIGKIQDSLSSTASALGKLQDVVNQNAQALNTLVKQLSSNFGAIS S VLNDILSRLDPPEAEVQIDRLITGRLQSLQTYVTQQLIRAAEIRASANLA AT KMSECVLGQSKRVDFCGKGYHLMSFPQSAPHGVVFLHVTYVPAQEKNFT TAPAICHDGKAHFPREGVFVSNGTHWFVTQRNFYEPQIITTDNTFVSGNC DVVIGIVNNTVYDPLQPELDSIKEELDKIHKGSGGSGDIIKLLNEQVNKE M QSSNLYMSMSSWCYTHSLDGAGLFLFDHAAEEYEHAKKLIIFLNENNVPV QLTSISAPEHKFEGLTQIFQKAYEHEQHISESINNIVDHAIKSKDHATFN FL QWYVAEQHEEEVLFKDILDKIELIGNENHGLYLADQYVKGIAKSRKSGS | 156 |
| 1B-06-PL combo | pCoV172 | PL-S2P.1159op1-del-Ferritin (revert P1143S)-F1148I/Y1155I/F1156H | 1,319 | SSQCVNLTTRTQLPPAYTNSFTRGVYYPDKVFRSSVLHSTQDLFLPFFSN V TWFHAIHVSGTNGTKRFDNPVLPFNDGVYFASTEKSNIIRGWIFGTTLDS K TQSLLIVNNATNVVIKVCEFQFCNDPFLGVYYHKNNKSWMESEFRVYSSA NNCTFEYVSQPFLMDLEGKQGNFKNLREFVFKNIDGYFKIYSKHTPINLV R DLPQGFSALEPLVDLPIGINITRFQTLLALHRSYLTPGDSSSGWTAGAAA Y YVGYLQPRTFLLKYNENGTITDAVDCALDPLSETKCTLKSFTVEKGIYQT S NFRVQPTESIVRFPNITNLCPFGEVFNATRFASVYAWNRKRISNCVADYS V LYNSASFSTFKCYGVSPTKLNDLCFTNVYADSFVIRGDEVRQIAPGQTGK I ADYNYKLPDDFTGCVIAWNSNNLDSKVGGNYNYLYRLFRKSNLKPFERD ISTEIYQAGSTPCNGVEGFNCYFPLQSYGFQPTNGVGYQPYRVVVLSFEL L HAPATVCGPKKSTNLVKNKCVNFNFNGLTGTGVLTESNKKFLPFQQFGR DIADTTDAVRDPQTLEILDITPCSFGGVSVITPGTNTSNQVAVLYQDVNC T EVPVAIHADQLTPTWRVYSTGSNVFQTRAGCLIGAEHVNNSYECDIPIGA GICASYQTQTNSPGSASSVASQSIIAYTMSLGAENSVAYSNNSIAIPTNF TIS VTTEILPVSMTKTSVDCTMYICGDSTECSNLLLQYGSFCTQLNRALTGIA V EQDKNTQEVFAQVKQIYKTPPIKDFGGFNFSQILPDPSKPSKRSFIEDLL FN KVTLADAGFIKQYGDCLGDIAARDLICAQKFNGLTVLPPLLTDEMIAQYT SALLAGTITSGWTFGAGAALQIPFAMQMAYRFNGIGVTQNVLYENQKLIA NQFNSAIGKIQDSLSSTASALGKLQDVVNQNAQALNTLVKQLSSNFGAIS S VLNDILSRLDPPEAEVQIDRLITGRLQSLQTYVTQQLIRAAEIRASANLA AT KMSECVLGQSKRVDFCGKGYHLMSFPQSAPHGVVFLHVTYVPAQEKNFT TAPAICHDGKAHFPREGVFVSNGTHWFVTQRNFYEPQIITTDNTFVSGNC DVVIGIVNNTVYDPLQPELDSIKEELDKIHKNHGSGGSGDIIKLLNEQVN K EMQSSNLYMSMSSWCYTHSLDGAGLFLFDHAAEEYEHAKKLIIFLNENN VPVQLTSISAPEHKFEGLTQIFQKAYEHEQHISESINNIVDHAIKSKDHA TF NFLQWYVAEQHEEEVLFKDILDKIELIGNENHGLYLADQYVKGIAKSRKS GS | 157 |
| 1B-06-PL combo | pCoV173 | PL-S2P.1160op1-del-Ferritin (revert P1143S)-F1148I/Y1155I/F1156H | 1,320 | SSQCVNLTTRTQLPPAYTNSFTRGVYYPDKVFRSSVLHSTQDLFLPFFSN V TWFHAIHVSGTNGTKRFDNPVLPFNDGVYFASTEKSNIIRGWIFGTTLDS K TQSLLIVNNATNVVIKVCEFQFCNDPFLGVYYHKNNKSWMESEFRVYSSA NNCTFEYVSQPFLMDLEGKQGNFKNLREFVFKNIDGYFKIYSKHTPINLV R DLPQGFSALEPLVDLPIGINITRFQTLLALHRSYLTPGDSSSGWTAGAAA Y YVGYLQPRTFLLKYNENGTITDAVDCALDPLSETKCTLKSFTVEKGIYQT S NFRVQPTESIVRFPNITNLCPFGEVFNATRFASVYAWNRKRISNCVADYS V LYNSASFSTFKCYGVSPTKLNDLCFTNVYADSFVIRGDEVRQIAPGQTGK I ADYNYKLPDDFTGCVIAWNSNNLDSKVGGNYNYLYRLFRKSNLKPFERD ISTEIYQAGSTPCNGVEGFNCYFPLQSYGFQPTNGVGYQPYRVVVLSFEL L HAPATVCGPKKSTNLVKNKCVNFNFNGLTGTGVLTESNKKFLPFQQFGR DIADTTDAVRDPQTLEILDITPCSFGGVSVITPGTNTSNQVAVLYQDVNC T EVPVAIHADQLTPTWRVYSTGSNVFQTRAGCLIGAEHVNNSYECDIPIGA GICASYQTQTNSPGSASSVASQSIIAYTMSLGAENSVAYSNNSIAIPTNF TIS VTTEILPVSMTKTSVDCTMYICGDSTECSNLLLQYGSFCTQLNRALTGIA V EQDKNTQEVFAQVKQIYKTPPIKDFGGFNFSQILPDPSKPSKRSFIEDLL FN KVTLADAGFIKQYGDCLGDIAARDLICAQKFNGLTVLPPLLTDEMIAQYT SALLAGTITSGWTFGAGAALQIPFAMQMAYRFNGIGVTQNVLYENQKLIA NQFNSAIGKIQDSLSSTASALGKLQDVVNQNAQALNTLVKQLSSNFGAIS S VLNDILSRLDPPEAEVQIDRLITGRLQSLQTYVTQQLIRAAEIRASANLA AT KMSECVLGQSKRVDFCGKGYHLMSFPQSAPHGVVFLHVTYVPAQEKNFT TAPAICHDGKAHFPREGVFVSNGTHWFVTQRNFYEPQIITTDNTFVSGNC DVVIGIVNNTVYDPLQPELDSIKEELDKIHKNHTGSGGSGDIIKLLNEQV N KEMQSSNLYMSMSSWCYTHSLDGAGLFLFDHAAEEYEHAKKLIIFLNEN NVPVQLTSISAPEHKFEGLTQIFQKAYEHEQHISESINNIVDHAIKSKDH AT FNFLQWYVAEQHEEEVLFKDILDKIELIGNENHGLYLADQYVKGIAKSRK SGS | 158 |
| 1B-05 with SARS 1 motif | pCoV174 | S2P.1154_SARS1-S2chimera-del-Ferritin | 1,310 | VNLTTRTQLPPAYTNSFTRGVYYPDKVFRSSVLHSTQDLFLPFFSNVTWF HAIHVSGTNGTKRFDNPVLPFNDGVYFASTEKSNIIRGWIFGTTLDSKTQ S LLIVNNATNVVIKVCEFQFCNDPFLGVYYHKNNKSWMESEFRVYSSANN CTFEYVSQPFLMDLEGKQGNFKNLREFVFKNIDGYFKIYSKHTPINLVRD L PQGFSALEPLVDLPIGINITRFQTLLALHRSYLTPGDSSSGWTAGAAAYY V GYLQPRTFLLKYNENGTITDAVDCALDPLSETKCTLKSFTVEKGIYQTSN F RVQPTESIVRFPNITNLCPFGEVFNATRFASVYAWNRKRISNCVADYSVL Y NSASFSTFKCYGVSPTKLNDLCFTNVYADSFVIRGDEVRQIAPGQTGKIA D YNYKLPDDFTGCVIAWNSNNLDSKVGGNYNYLYRLFRKSNLKPFERDIST EIYQAGSTPCNGVEGFNCYFPLQSYGFQPTNGVGYQPYRVVVLSFELLHA PATVCGPKKSTNLVKNKCVNFNFNGLTGTGVLTESNKKFLPFQQFGRDIA DTTDAVRDPQTLEILDITPCSFGGVSVITPGTNTSNQVAVLYQDVNCTEV P VAIHADQLTPTWRVYSTGSNVFQTRAGCLIGAEHVNNSYECDIPIGAGIC A SYQTQTNSPGSASSVASQSIIAYTMSLGAENSVAYSNNTIAIPTNFTISV TTE ILPVSMTKTSVDCTMYICGDSTECSNLLLQYGSFCTQLNRALTGIAVEQD K NTQEVFAQVKQIYKTPPIKDFGGFNFSQILPDPSKPSKRSFIEDLLFNKV TL ADAGFIKQYGDCLGDIAARDLICAQKFNGLTVLPPLLTDEMIAQYTSALL AGTITSGWTFGAGAALQIPFAMQMAYRFNGIGVTQNVLYENQKLIANQF NSAIGKIQDSLSSTASALGKLQDVVNQNAQALNTLVKQLSSNFGAISSVL N DILSRLDPPEAEVQIDRLITGRLQSLQTYVTQQLIRAAEIRASANLAATK MS ECVLGQSKRVDFCGKGYHLMSFPQSAPHGVVFLHVTYVPAQEKNFTTAP AICHDGKAHFPREGVFVSNGTHWFVTQRNFYEPQIITTDNTFVSGNCDVV I GIVNNTVYDPLQPELDSFKEELDKGSGGSGDIIKLLNEQVNKEMQSSNLY MSMSSWCYTHSLDGAGLFLFDHAAEEYEHAKKLIIFLNENNVPVQLTSIS APEHKFEGLTQIFQKAYEHEQHISESINNIVDHAIKSKDHATFNFLQWYV A EQHEEEVLFKDILDKIELIGNENHGLYLADQYVKGIAKSRKSGS | 159 |
| 1B-06 with SARS 1 motif | pCoV175 | PL- S2P.1158op1_SARS1-S2chimera-del-Ferritin | 1,318 | SSQCVNLTTRTQLPPAYTNSFTRGVYYPDKVFRSSVLHSTQDLFLPFFSN V TWFHAIHVSGTNGTKRFDNPVLPFNDGVYFASTEKSNIIRGWIFGTTLDS K TQSLLIVNNATNVVIKVCEFQFCNDPFLGVYYHKNNKSWMESEFRVYSSA NNCTFEYVSQPFLMDLEGKQGNFKNLREFVFKNIDGYFKIYSKHTPINLV R DLPQGFSALEPLVDLPIGINITRFQTLLALHRSYLTPGDSSSGWTAGAAA Y YVGYLQPRTFLLKYNENGTITDAVDCALDPLSETKCTLKSFTVEKGIYQT S NFRVQPTESIVRFPNITNLCPFGEVFNATRFASVYAWNRKRISNCVADYS V LYNSASFSTFKCYGVSPTKLNDLCFTNVYADSFVIRGDEVRQIAPGQTGK I ADYNYKLPDDFTGCVIAWNSNNLDSKVGGNYNYLYRLFRKSNLKPFERD ISTEIYQAGSTPCNGVEGFNCYFPLQSYGFQPTNGVGYQPYRVVVLSFEL L HAPATVCGPKKSTNLVKNKCVNFNFNGLTGTGVLTESNKKFLPFQQFGR DIADTTDAVRDPQTLEILDITPCSFGGVSVITPGTNTSNQVAVLYQDVNC T EVPVAIHADQLTPTWRVYSTGSNVFQTRAGCLIGAEHVNNSYECDIPIGA GICASYQTQTNSPGSASSVASQSIIAYTMSLGAENSVAYSNNTIAIPTNF TIS VTTEILPVSMTKTSVDCTMYICGDSTECSNLLLQYGSFCTQLNRALTGIA V EQDKNTQEVFAQVKQIYKTPPIKDFGGFNFSQILPDPSKPSKRSFIEDLL FN KVTLADAGFIKQYGDCLGDIAARDLICAQKFNGLTVLPPLLTDEMIAQYT SALLAGTITSGWTFGAGAALQIPFAMQMAYRFNGIGVTQNVLYENQKLIA NQFNSAIGKIQDSLSSTASALGKLQDVVNQNAQALNTLVKQLSSNFGAIS S VLNDILSRLDPPEAEVQIDRLITGRLQSLQTYVTQQLIRAAEIRASANLA AT KMSECVLGQSKRVDFCGKGYHLMSFPQSAPHGVVFLHVTYVPAQEKNFT TAPAICHDGKAHFPREGVFVSNGTHWFVTQRNFYEPQIITTDNTFVSGNC DVVIGIVNNTVYDPLQSELDSIKEELDKIHKNGSGGSGDIIKLLNEQVNK E MQSSNLYMSMSSWCYTHSLDGAGLFLFDHAAEEYEHAKKLIIFLNENNV PVQLTSISAPEHKFEGLTQIFQKAYEHEQHISESINNIVDHAIKSKDHAT FNF LQWYVAEQHEEEVLFKDILDKIELIGNENHGLYLADQYVKGIAKSRKSGS | 160 |
| 1B-05 with DS2 | pCoV176 | S2P.1154_DS2-del-Ferritin | 1,310 | VNLTTRTQLPPAYTNSFTRGVYYPDKVFRSSVLHSTQDLFLPFFSNVTWF HAIHVSGTNGTKRFDNPVLPFNDGVYFASTEKSNIIRGWIFGTTLDSKTQ S LLIVNNATNVVIKVCEFQFCNDPFLGVYYHKNNKSWMESEFRVYSSANN CTFEYVSQPFLMDLEGKQGNFKNLREFVFKNIDGYFKIYSKHTPINLVRD L PQGFSALEPLVDLPIGINITRFQTLLALHRSYLTPGDSSSGWTAGAAAYY V GYLQPRTFLLKYNENGTITDAVDCALDPLSETKCTLKSFTVEKGIYQTSN F RVQPTESIVRFPNITNLCPFGEVFNATRFASVYAWNRKRISNCVADYSVL Y NSASFSTFKCYGVSPTKLNDLCFTNVYADSFVIRGDEVRQIAPGQTGKIA D YNYKLPDDFTGCVIAWNSNNLDSKVGGNYNYLYRLFRKSNLKPFERDIST EIYQAGSTPCNGVEGFNCYFPLQSYGFQPTNGVGYQPYRVVVLSFELLHA PATVCGPKKSTNLVKNKCVNFNFNGLTGTGVLTESNKKFLPFQQFGRDIA DTTDAVRDPQTLEILDITPCSFGGVSVITPGTNTSNQVAVLYQDVNCTEV P VAIHADQLTPTWRVYSTGSNVFQTRAGCLIGAEHVNNSYECDIPIGAGIC A SYQTQTNSPGSASSVASQSIIAYTMSLGAENSVAYSNNSIAIPTNFTISV TTE ILPVSMTKTSVDCTMYICGDSTECSNLLLQYGSFCTQLNRALTGIAVEQD K CTQEVFAQVKQIYKTPPIKDFGGFNFSQILPDPSKPSKRSFIEDLLFNKV TL ADAGFIKQYGDCLGDIAARDLICAQKFNGLTVLPPLLTDEMIAQYTSALL AGTITSGWTFGAGAALQIPFAMQMAYRFNGIGVTQNVLYENQKLIANQF NSAIGKIQDSLSSTASALGKLQDVVNQNAQALNTLVKQLSSNFGAISSVL N DILSRLDPPEAEVQIDRLITGRLQSLQTYVTQQLIRAAEIRASCNLAATK MS ECVLGQSKRVDFCGKGYHLMSFPQSAPHGVVFLHVTYVPAQEKNFTTAP AICHDGKAHFPREGVFVSNGTHWFVTQRNFYEPQIITTDNTFVSGNCDVV I GIVNNTVYDPLQPELDSFKEELDKGSGGSGDIIKLLNEQVNKEMQSSNLY MSMSSWCYTHSLDGAGLFLFDHAAEEYEHAKKLIIFLNENNVPVQLTSIS APEHKFEGLTQIFQKAYEHEQHISESINNIVDHAIKSKDHATFNFLQWYV A EQHEEEVLFKDILDKIELIGNENHGLYLADQYVKGIAKSRKSGS | 161 |
| 1B-06-PL with DS2 | pCoV177 | PL-S2P.1158_DS2-del-Ferritin | 1,318 | SSQCVNLTTRTQLPPAYTNSFTRGVYYPDKVFRSSVLHSTQDLFLPFFSN V TWFHAIHVSGTNGTKRFDNPVLPFNDGVYFASTEKSNIIRGWIFGTTLDS K TQSLLIVNNATNVVIKVCEFQFCNDPFLGVYYHKNNKSWMESEFRVYSSA NNCTFEYVSQPFLMDLEGKQGNFKNLREFVFKNIDGYFKIYSKHTPINLV R DLPQGFSALEPLVDLPIGINITRFQTLLALHRSYLTPGDSSSGWTAGAAA Y YVGYLQPRTFLLKYNENGTITDAVDCALDPLSETKCTLKSFTVEKGIYQT S NFRVQPTESIVRFPNITNLCPFGEVFNATRFASVYAWNRKRISNCVADYS V LYNSASFSTFKCYGVSPTKLNDLCFTNVYADSFVIRGDEVRQIAPGQTGK I ADYNYKLPDDFTGCVIAWNSNNLDSKVGGNYNYLYRLFRKSNLKPFERD ISTEIYQAGSTPCNGVEGFNCYFPLQSYGFQPTNGVGYQPYRVVVLSFEL L HAPATVCGPKKSTNLVKNKCVNFNFNGLTGTGVLTESNKKFLPFQQFGR DIADTTDAVRDPQTLEILDITPCSFGGVSVITPGTNTSNQVAVLYQDVNC T EVPVAIHADQLTPTWRVYSTGSNVFQTRAGCLIGAEHVNNSYECDIPIGA GICASYQTQTNSPGSASSVASQSIIAYTMSLGAENSVAYSNNSIAIPTNF TIS VTTEILPVSMTKTSVDCTMYICGDSTECSNLLLQYGSFCTQLNRALTGIA V EQDKCTQEVFAQVKQIYKTPPIKDFGGFNFSQILPDPSKPSKRSFIEDLL FN KVTLADAGFIKQYGDCLGDIAARDLICAQKFNGLTVLPPLLTDEMIAQYT SALLAGTITSGWTFGAGAALQIPFAMQMAYRFNGIGVTQNVLYENQKLIA NQFNSAIGKIQDSLSSTASALGKLQDVVNQNAQALNTLVKQLSSNFGAIS S VLNDILSRLDPPEAEVQIDRLITGRLQSLQTYVTQQLIRAAEIRASCNLA AT KMSECVLGQSKRVDFCGKGYHLMSFPQSAPHGVVFLHVTYVPAQEKNFT TAPAICHDGKAHFPREGVFVSNGTHWFVTQRNFYEPQIITTDNTFVSGNC DVVIGIVNNTVYDPLQSELDSIKEELDKIHKNGSGGSGDIIKLLNEQVNK E MQSSNLYMSMSSWCYTHSLDGAGLFLFDHAAEEYEHAKKLIIFLNENNV PVQLTSISAPEHKFEGLTQIFQKAYEHEQHISESINNIVDHAIKSKDHAT FNF LQWYVAEQHEEEVLFKDILDKIELIGNENHGLYLADQYVKGIAKSRKSGS | 162 |
| 1B-05 with DS3 | pCoV178 | S2P.1154_DS3-del-Ferritin | 1,310 | VNLTTRTQLPPAYTNSFTRGVYYPDKVFRSSVLHSTQDLFLPFFSNVTWF HAIHVSGTNGTKRFDNPVLPFNDGVYFASTEKSNIIRGWIFGTTLDSKTQ S LLIVNNATNVVIKVCEFQFCNDPFLGVYYHKNNKSWMESEFRVYSSANN CTFEYVSQPFLMDLEGKQGNFKNLREFVFKNIDGYFKIYSKHTPINLVRD L PQGFSALEPLVDLPIGINITRFQTLLALHRSYLTPGDSSSGWTAGAAAYY V GYLQPRTFLLKYNENGTITDAVDCALDPLSETKCTLKSFTVEKGIYQTSN F RVQPTESIVRFPNITNLCPFGEVFNATRFASVYAWNRKRISNCVADYSVL Y NSASFSTFKCYGVSPTKLNDLCFTNVYADSFVIRGDEVRQIAPGQTGKIA D YNYKLPDDFTGCVIAWNSNNLDSKVGGNYNYLYRLFRKSNLKPFERDIST EIYQAGSTPCNGVEGFNCYFPLQSYGFQPTNGVGYQPYRVVVLSFELLHA PATVCGPKKSTNLVKNKCVNFNFNGLTGTGVLTESNKKFLPFQQFGRDIA DTTDAVRDPQTLEILDITPCSFGGVSVITPGTNTSNQVAVLYQDVNCTEV P VAIHADQLTPTWRVYSTGSNVFQTRAGCLIGAEHVNNSYECDIPIGAGIC A SYQTQTNSPGSASSVASQSIIAYTMSLGAENSVAYSNNSIAIPTNFTISV TTE ILPVSMTCTSVDCTMYICGDSTECSNLLLQYGSFCTQLNRALTGICVEQD K NTQEVFAQVKQIYKTPPIKDFGGFNFSQILPDPSKPSKRSFIEDLLFNKV TL ADAGFIKQYGDCLGDIAARDLICAQKFNGLTVLPPLLTDEMIAQYTSALL AGTITSGWTFGAGAALQIPFAMQMAYRFNGIGVTQNVLYENQKLIANQF NSAIGKIQDSLSSTASALGKLQDVVNQNAQALNTLVKQLSSNFGAISSVL N DILSRLDPPEAEVQIDRLITGRLQSLQTYVTQQLIRAAEIRASANLAATK MS ECVLGQSKRVDFCGKGYHLMSFPQSAPHGVVFLHVTYVPAQEKNFTTAP AICHDGKAHFPREGVFVSNGTHWFVTQRNFYEPQIITTDNTFVSGNCDVV I GIVNNTVYDPLQPELDSFKEELDKGSGGSGDIIKLLNEQVNKEMQSSNLY MSMSSWCYTHSLDGAGLFLFDHAAEEYEHAKKLIIFLNENNVPVQLTSIS APEHKFEGLTQIFQKAYEHEQHISESINNIVDHAIKSKDHATFNFLQWYV A EQHEEEVLFKDILDKIELIGNENHGLYLADQYVKGIAKSRKSGS | 163 |
| 1B-06-PL with DS3 | pCoV179 | PL-S2P.1158_DS3-del-Ferritin | 1,318 | SSQCVNLTTRTQLPPAYTNSFTRGVYYPDKVFRSSVLHSTQDLFLPFFSN V TWFHAIHVSGTNGTKRFDNPVLPFNDGVYFASTEKSNIIRGWIFGTTLDS K TQSLLIVNNATNVVIKVCEFQFCNDPFLGVYYHKNNKSWMESEFRVYSSA NNCTFEYVSQPFLMDLEGKQGNFKNLREFVFKNIDGYFKIYSKHTPINLV R DLPQGFSALEPLVDLPIGINITRFQTLLALHRSYLTPGDSSSGWTAGAAA Y YVGYLQPRTFLLKYNENGTITDAVDCALDPLSETKCTLKSFTVEKGIYQT S NFRVQPTESIVRFPNITNLCPFGEVFNATRFASVYAWNRKRISNCVADYS V LYNSASFSTFKCYGVSPTKLNDLCFTNVYADSFVIRGDEVRQIAPGQTGK I ADYNYKLPDDFTGCVIAWNSNNLDSKVGGNYNYLYRLFRKSNLKPFERD ISTEIYQAGSTPCNGVEGFNCYFPLQSYGFQPTNGVGYQPYRVVVLSFEL L HAPATVCGPKKSTNLVKNKCVNFNFNGLTGTGVLTESNKKFLPFQQFGR DIADTTDAVRDPQTLEILDITPCSFGGVSVITPGTNTSNQVAVLYQDVNC T EVPVAIHADQLTPTWRVYSTGSNVFQTRAGCLIGAEHVNNSYECDIPIGA GICASYQTQTNSPGSASSVASQSIIAYTMSLGAENSVAYSNNSIAIPTNF TIS VTTEILPVSMTCTSVDCTMYICGDSTECSNLLLQYGSFCTQLNRALTGIC V EQDKNTQEVFAQVKQIYKTPPIKDFGGFNFSQILPDPSKPSKRSFIEDLL FN KVTLADAGFIKQYGDCLGDIAARDLICAQKFNGLTVLPPLLTDEMIAQYT SALLAGTITSGWTFGAGAALQIPFAMQMAYRFNGIGVTQNVLYENQKLIA NQFNSAIGKIQDSLSSTASALGKLQDVVNQNAQALNTLVKQLSSNFGAIS S VLNDILSRLDPPEAEVQIDRLITGRLQSLQTYVTQQLIRAAEIRASANLA AT KMSECVLGQSKRVDFCGKGYHLMSFPQSAPHGVVFLHVTYVPAQEKNFT TAPAICHDGKAHFPREGVFVSNGTHWFVTQRNFYEPQIITTDNTFVSGNC DVVIGIVNNTVYDPLQSELDSIKEELDKIHKNGSGGSGDIIKLLNEQVNK E MQSSNLYMSMSSWCYTHSLDGAGLFLFDHAAEEYEHAKKLIIFLNENNV PVQLTSISAPEHKFEGLTQIFQKAYEHEQHISESINNIVDHAIKSKDHAT FNF LQWYVAEQHEEEVLFKDILDKIELIGNENHGLYLADQYVKGIAKSRKSGS | 164 |
| 1B-05 with more UP | pCoV180 | S2P.1154_moreUP-del-Ferritin (Henderson, et al.) | 1,310 | VNLTTRTQLPPAYTNSFTRGVYYPDKVFRSSVLHSTQDLFLPFFSNVTWF HAIHVSGTNGTKRFDNPVLPFNDGVYFASTEKSNIIRGWIFGTTLDSKTQ S LLIVNNATNVVIKVCEFQFCNDPFLGVYYHKNNKSWMESEFRVYSSANN CTFEYVSQPFLMDLEGKQGNFKNLREFVFKNIDGYFKIYSKHTPINLVRD L PQGFSALEPLVDLPIGINITRFQTLLALHRSYLTPGDSSSGWTAGAAAYY V GYLQPRTFLLKYNENGTITDAVDCALDPLSETKCTLKSFTVEKGIYQTSN F RVQPTESIVRFPNITNLCPFGEVFNATRFASVYAWNRKRISNCVADYSVL Y NSASFSTFKCYGVSPTKLNDLCFTNVYADSFVIRGDEVRQIAPGQTGKIA D YNYKLPDDFTGCVIAWNSNNLDSKVGGNYNYLYRLFRKSNLKPFERDIST EIYQAGSTPCNGVEGFNCYFPLQSYGFQPTNGVGYQPYRVVVLSFELLHA PATVCGPKKSTNLVKNKCVNFNFNGLTGTGVLTESNKKFLPFQQFGRDIL DTIDAVRDPQTLEILDITPCSFGGVSVITPGTNTSNQVAVLYQDVNCTEV P VAIHADQLTPTWRVYSTGSNVFQTRAGCLIGAEHVNNSYECDIPIGAGIC A SYQTQTNSPGSASSVASQSIIAYTMSLGAENSVAYSNNSIAIPTNFTISV TTE ILPVSMTKTSVDCTMYICGDSTECSNLLLQYGSFCTQLNRALTGIAVEQD K NTQEVFAQVKQIYKTPPIKDFGGFNFSQILPDPSKPSKRSFIEDLLFNKV TL ADAGFIKQYGDCLGDIAARDLICAQKYIGLTVLPPLLTDEMIAQYTSALL A GTITSGWTFGAGAALQIPFAMQMAYRFNGIGVTQNVLYENQKLIANQFNS AIGKIQDSLSSTASALGKLQDVVNQNAQALNTLVKQLSSNFGAISSVLND I LSRLDPPEAEVQIDRLITGRLQSLQTYVTQQLIRAAEIRASANLAATKMS E CVLGQSKRVDFCGKGYHLMSFPQSAPHGVVFLHVTYVPAQEKNFTTAPA ICHDGKAHFPREGVFVSNGTHWFVTQRNFYEPQIITTDNTFVSGNCDVVI G IVNNTVYDPLQPELDSFKEELDKGSGGSGDIIKLLNEQVNKEMQSSNLYM SMSSWCYTHSLDGAGLFLFDHAAEEYEHAKKLIIFLNENNVPVQLTSISA P EHKFEGLTQIFQKAYEHEQHISESINNIVDHAIKSKDHATFNFLQWYVAE Q HEEEVLFKDILDKIELIGNENHGLYLADQYVKGIAKSRKSGS | 165 |
| 1B-06-PL with more UP | pCoV181 | PL-S2P.1158op1_moreUP-del-Ferritin (Henderson, et al.) | 1,318 | SSQCVNLTTRTQLPPAYTNSFTRGVYYPDKVFRSSVLHSTQDLFLPFFSN V TWFHAIHVSGTNGTKRFDNPVLPFNDGVYFASTEKSNIIRGWIFGTTLDS K TQSLLIVNNATNVVIKVCEFQFCNDPFLGVYYHKNNKSWMESEFRVYSSA NNCTFEYVSQPFLMDLEGKQGNFKNLREFVFKNIDGYFKIYSKHTPINLV R DLPQGFSALEPLVDLPIGINITRFQTLLALHRSYLTPGDSSSGWTAGAAA Y YVGYLQPRTFLLKYNENGTITDAVDCALDPLSETKCTLKSFTVEKGIYQT S NFRVQPTESIVRFPNITNLCPFGEVFNATRFASVYAWNRKRISNCVADYS V LYNSASFSTFKCYGVSPTKLNDLCFTNVYADSFVIRGDEVRQIAPGQTGK I ADYNYKLPDDFTGCVIAWNSNNLDSKVGGNYNYLYRLFRKSNLKPFERD ISTEIYQAGSTPCNGVEGFNCYFPLQSYGFQPTNGVGYQPYRVVVLSFEL L HAPATVCGPKKSTNLVKNKCVNFNFNGLTGTGVLTESNKKFLPFQQFGR DILDTIDAVRDPQTLEILDITPCSFGGVSVITPGTNTSNQVAVLYQDVNC TE VPVAIHADQLTPTWRVYSTGSNVFQTRAGCLIGAEHVNNSYECDIPIGAG I CASYQTQTNSPGSASSVASQSIIAYTMSLGAENSVAYSNNSIAIPTNFTI SV TTEILPVSMTKTSVDCTMYICGDSTECSNLLLQYGSFCTQLNRALTGIAV E QDKNTQEVFAQVKQIYKTPPIKDFGGFNFSQILPDPSKPSKRSFIEDLLF NK VTLADAGFIKQYGDCLGDIAARDLICAQKYIGLTVLPPLLTDEMIAQYTS A LLAGTITSGWTFGAGAALQIPFAMQMAYRFNGIGVTQNVLYENQKLIAN QFNSAIGKIQDSLSSTASALGKLQDVVNQNAQALNTLVKQLSSNFGAISS V LNDILSRLDPPEAEVQIDRLITGRLQSLQTYVTQQLIRAAEIRASANLAA TK MSECVLGQSKRVDFCGKGYHLMSFPQSAPHGVVFLHVTYVPAQEKNFTT APAICHDGKAHFPREGVFVSNGTHWFVTQRNFYEPQIITTDNTFVSGNCD VVIGIVNNTVYDPLQSELDSIKEELDKIHKNGSGGSGDIIKLLNEQVNKE M QSSNLYMSMSSWCYTHSLDGAGLFLFDHAAEEYEHAKKLIIFLNENNVPV QLTSISAPEHKFEGLTQIFQKAYEHEQHISESINNIVDHAIKSKDHATFN FL QWYVAEQHEEEVLFKDILDKIELIGNENHGLYLADQYVKGIAKSRKSGS | 166 |
| 1B-05 with HexaPro | pCoV182 | S2P-HexaPro.1154-del-Ferritin | 1,310 | VNLTTRTQLPPAYTNSFTRGVYYPDKVFRSSVLHSTQDLFLPFFSNVTWF HAIHVSGTNGTKRFDNPVLPFNDGVYFASTEKSNIIRGWIFGTTLDSKTQ S LLIVNNATNVVIKVCEFQFCNDPFLGVYYHKNNKSWMESEFRVYSSANN CTFEYVSQPFLMDLEGKQGNFKNLREFVFKNIDGYFKIYSKHTPINLVRD L PQGFSALEPLVDLPIGINITRFQTLLALHRSYLTPGDSSSGWTAGAAAYY V GYLQPRTFLLKYNENGTITDAVDCALDPLSETKCTLKSFTVEKGIYQTSN F RVQPTESIVRFPNITNLCPFGEVFNATRFASVYAWNRKRISNCVADYSVL Y NSASFSTFKCYGVSPTKLNDLCFTNVYADSFVIRGDEVRQIAPGQTGKIA D YNYKLPDDFTGCVIAWNSNNLDSKVGGNYNYLYRLFRKSNLKPFERDIST EIYQAGSTPCNGVEGFNCYFPLQSYGFQPTNGVGYQPYRVVVLSFELLHA PATVCGPKKSTNLVKNKCVNFNFNGLTGTGVLTESNKKFLPFQQFGRDIA DTTDAVRDPQTLEILDITPCSFGGVSVITPGTNTSNQVAVLYQDVNCTEV P VAIHADQLTPTWRVYSTGSNVFQTRAGCLIGAEHVNNSYECDIPIGAGIC A SYQTQTNSPGSASSVASQSIIAYTMSLGAENSVAYSNNSIAIPTNFTISV TTE ILPVSMTKTSVDCTMYICGDSTECSNLLLQYGSFCTQLNRALTGIAVEQD K NTQEVFAQVKQIYKTPPIKDFGGFNFSQILPDPSKPSKRSPIEDLLFNKV TL ADAGFIKQYGDCLGDIAARDLICAQKFNGLTVLPPLLTDEMIAQYTSALL AGTITSGWTFGAGPALQIPFPMQMAYRFNGIGVTQNVLYENQKLIANQFN SAIGKIQDSLSSTPSALGKLQDVVNQNAQALNTLVKQLSSNFGAISSVLN D ILSRLDPPEAEVQIDRLITGRLQSLQTYVTQQLIRAAEIRASANLAATKM SE CVLGQSKRVDFCGKGYHLMSFPQSAPHGVVFLHVTYVPAQEKNFTTAPA ICHDGKAHFPREGVFVSNGTHWFVTQRNFYEPQIITTDNTFVSGNCDVVI G IVNNTVYDPLQPELDSFKEELDKGSGGSGDIIKLLNEQVNKEMQSSNLYM SMSSWCYTHSLDGAGLFLFDHAAEEYEHAKKLIIFLNENNVPVQLTSISA P EHKFEGLTQIFQKAYEHEQHISESINNIVDHAIKSKDHATFNFLQWYVAE Q HEEEVLFKDILDKIELIGNENHGLYLADQYVKGIAKSRKSGS | 167 |
| 1B-06-PL with HexaPro | pCoV183 | S2P-HexaPro.115 8 op1-del-Ferritin (aka 1B-06-PL with HexaPro) | 1,318 | SSQCVNLTTRTQLPPAYTNSFTRGVYYPDKVFRSSVLHSTQDLFLPFFSN V TWFHAIHVSGTNGTKRFDNPVLPFNDGVYFASTEKSNIIRGWIFGTTLDS K TQSLLIVNNATNVVIKVCEFQFCNDPFLGVYYHKNNKSWMESEFRVYSSA NNCTFEYVSQPFLMDLEGKQGNFKNLREFVFKNIDGYFKIYSKHTPINLV R DLPQGFSALEPLVDLPIGINITRFQTLLALHRSYLTPGDSSSGWTAGAAA Y YVGYLQPRTFLLKYNENGTITDAVDCALDPLSETKCTLKSFTVEKGIYQT S NFRVQPTESIVRFPNITNLCPFGEVFNATRFASVYAWNRKRISNCVADYS V LYNSASFSTFKCYGVSPTKLNDLCFTNVYADSFVIRGDEVRQIAPGQTGK I ADYNYKLPDDFTGCVIAWNSNNLDSKVGGNYNYLYRLFRKSNLKPFERD ISTEIYQAGSTPCNGVEGFNCYFPLQSYGFQPTNGVGYQPYRVVVLSFEL L HAPATVCGPKKSTNLVKNKCVNFNFNGLTGTGVLTESNKKFLPFQQFGR DIADTTDAVRDPQTLEILDITPCSFGGVSVITPGTNTSNQVAVLYQDVNC T EVPVAIHADQLTPTWRVYSTGSNVFQTRAGCLIGAEHVNNSYECDIPIGA GICASYQTQTNSPGSASSVASQSIIAYTMSLGAENSVAYSNNSIAIPTNF TIS VTTEILPVSMTKTSVDCTMYICGDSTECSNLLLQYGSFCTQLNRALTGIA V EQDKNTQEVFAQVKQIYKTPPIKDFGGFNFSQILPDPSKPSKRSPIEDLL FN KVTLADAGFIKQYGDCLGDIAARDLICAQKFNGLTVLPPLLTDEMIAQYT SALLAGTITSGWTFGAGPALQIPFPMQMAYRFNGIGVTQNVLYENQKLIA NQFNSAIGKIQDSLSSTPSALGKLQDVVNQNAQALNTLVKQLSSNFGAIS S VLNDILSRLDPPEAEVQIDRLITGRLQSLQTYVTQQLIRAAEIRASANLA AT KMSECVLGQSKRVDFCGKGYHLMSFPQSAPHGVVFLHVTYVPAQEKNFT TAPAICHDGKAHFPREGVFVSNGTHWFVTQRNFYEPQIITTDNTFVSGNC DVVIGIVNNTVYDPLQSELDSIKEELDKIHKNGSGGSGDIIKLLNEQVNK E MQSSNLYMSMSSWCYTHSLDGAGLFLFDHAAEEYEHAKKLIIFLNENNV PVQLTSISAPEHKFEGLTQIFQKAYEHEQHISESINNIVDHAIKSKDHAT FNF LQWYVAEQHEEEVLFKDILDKIELIGNENHGLYLADQYVKGIAKSRKSGS | 168 |
| 167 with HexaPro | pCoV184 | S2P-HexaPro.1158-del-Ferritin (F1148I/Y115 5I/F1156H) | 1,318 | SSQCVNLTTRTQLPPAYTNSFTRGVYYPDKVFRSSVLHSTQDLFLPFFSN V TWFHAIHVSGTNGTKRFDNPVLPFNDGVYFASTEKSNIIRGWIFGTTLDS K TQSLLIVNNATNVVIKVCEFQFCNDPFLGVYYHKNNKSWMESEFRVYSSA NNCTFEYVSQPFLMDLEGKQGNFKNLREFVFKNIDGYFKIYSKHTPINLV R DLPQGFSALEPLVDLPIGINITRFQTLLALHRSYLTPGDSSSGWTAGAAA Y YVGYLQPRTFLLKYNENGTITDAVDCALDPLSETKCTLKSFTVEKGIYQT S NFRVQPTESIVRFPNITNLCPFGEVFNATRFASVYAWNRKRISNCVADYS V LYNSASFSTFKCYGVSPTKLNDLCFTNVYADSFVIRGDEVRQIAPGQTGK I ADYNYKLPDDFTGCVIAWNSNNLDSKVGGNYNYLYRLFRKSNLKPFERD ISTEIYQAGSTPCNGVEGFNCYFPLQSYGFQPTNGVGYQPYRVVVLSFEL L HAPATVCGPKKSTNLVKNKCVNFNFNGLTGTGVLTESNKKFLPFQQFGR DIADTTDAVRDPQTLEILDITPCSFGGVSVITPGTNTSNQVAVLYQDVNC T EVPVAIHADQLTPTWRVYSTGSNVFQTRAGCLIGAEHVNNSYECDIPIGA GICASYQTQTNSPGSASSVASQSIIAYTMSLGAENSVAYSNNSIAIPTNF TIS VTTEILPVSMTKTSVDCTMYICGDSTECSNLLLQYGSFCTQLNRALTGIA V EQDKNTQEVFAQVKQIYKTPPIKDFGGFNFSQILPDPSKPSKRSPIEDLL FN KVTLADAGFIKQYGDCLGDIAARDLICAQKFNGLTVLPPLLTDEMIAQYT SALLAGTITSGWTFGAGPALQIPFPMQMAYRFNGIGVTQNVLYENQKLIA NQFNSAIGKIQDSLSSTPSALGKLQDVVNQNAQALNTLVKQLSSNFGAIS S VLNDILSRLDPPEAEVQIDRLITGRLQSLQTYVTQQLIRAAEIRASANLA AT KMSECVLGQSKRVDFCGKGYHLMSFPQSAPHGVVFLHVTYVPAQEKNFT TAPAICHDGKAHFPREGVFVSNGTHWFVTQRNFYEPQIITTDNTFVSGNC DVVIGIVNNTVYDPLQPELDSIKEELDKIHKNGSGGSGDIIKLLNEQVNK E MQSSNLYMSMSSWCYTHSLDGAGLFLFDHAAEEYEHAKKLIIFLNENNV PVQLTSISAPEHKFEGLTQIFQKAYEHEQHISESINNIVDHAIKSKDHAT FNF LQWYVAEQHEEEVLFKDILDKIELIGNENHGLYLADQYVKGIAKSRKSGS | 169 |
| 47 with HexaPro | pCoV185 | S2P-HexaPro.1240-Fd-His-TwinStrep (McLellan Lab) | 1,271 | VNLTTRTQLPPAYTNSFTRGVYYPDKVFRSSVLHSTQDLFLPFFSNVTWF HAIHVSGTNGTKRFDNPVLPFNDGVYFASTEKSNIIRGWIFGTTLDSKTQ S LLIVNNATNVVIKVCEFQFCNDPFLGVYYHKNNKSWMESEFRVYSSANN CTFEYVSQPFLMDLEGKQGNFKNLREFVFKNIDGYFKIYSKHTPINLVRD L PQGFSALEPLVDLPIGINITRFQTLLALHRSYLTPGDSSSGWTAGAAAYY V GYLQPRTFLLKYNENGTITDAVDCALDPLSETKCTLKSFTVEKGIYQTSN F RVQPTESIVRFPNITNLCPFGEVFNATRFASVYAWNRKRISNCVADYSVL Y NSASFSTFKCYGVSPTKLNDLCFTNVYADSFVIRGDEVRQIAPGQTGKIA D YNYKLPDDFTGCVIAWNSNNLDSKVGGNYNYLYRLFRKSNLKPFERDIST EIYQAGSTPCNGVEGFNCYFPLQSYGFQPTNGVGYQPYRVVVLSFELLHA PATVCGPKKSTNLVKNKCVNFNFNGLTGTGVLTESNKKFLPFQQFGRDIA DTTDAVRDPQTLEILDITPCSFGGVSVITPGTNTSNQVAVLYQDVNCTEV P VAIHADQLTPTWRVYSTGSNVFQTRAGCLIGAEHVNNSYECDIPIGAGIC A SYQTQTNSPGSASSVASQSIIAYTMSLGAENSVAYSNNSIAIPTNFTISV TTE ILPVSMTKTSVDCTMYICGDSTECSNLLLQYGSFCTQLNRALTGIAVEQD K NTQEVFAQVKQIYKTPPIKDFGGFNFSQILPDPSKPSKRSPIEDLLFNKV TL ADAGFIKQYGDCLGDIAARDLICAQKFNGLTVLPPLLTDEMIAQYTSALL AGTITSGWTFGAGPALQIPFPMQMAYRFNGIGVTQNVLYENQKLIANQFN SAIGKIQDSLSSTPSALGKLQDVVNQNAQALNTLVKQLSSNFGAISSVLN D ILSRLDPPEAEVQIDRLITGRLQSLQTYVTQQLIRAAEIRASANLAATKM SE CVLGQSKRVDFCGKGYHLMSFPQSAPHGVVFLHVTYVPAQEKNFTTAPA ICHDGKAHFPREGVFVSNGTHWFVTQRNFYEPQIITTDNTFVSGNCDVVI G IVNNTVYDPLQPELDSFKEELDKYFKNHTSPDVDLGDISGINASVVNIQK EI DRLNEVAKNLNESLIDLQELGKYEQGSGYIPEAPRDGQAYVRKDGEWVL LSTFLGLEVLFQGPSAWSHPQFEKGGGSGGGSGGSAWSHPQFEKGSHHH HHHHH | 170 |
| 1B-06-PL with HexaPro + D614G | pCoV186 | S2P-HexaPro.1158 op1-del-Ferritin-D614G (aka 1B-06-PL with HexaPro and D614G) | 1,318 | SSQCVNLTTRTQLPPAYTNSFTRGVYYPDKVFRSSVLHSTQDLFLPFFSN V TWFHAIHVSGTNGTKRFDNPVLPFNDGVYFASTEKSNIIRGWIFGTTLDS K TQSLLIVNNATNVVIKVCEFQFCNDPFLGVYYHKNNKSWMESEFRVYSSA NNCTFEYVSQPFLMDLEGKQGNFKNLREFVFKNIDGYFKIYSKHTPINLV R DLPQGFSALEPLVDLPIGINITRFQTLLALHRSYLTPGDSSSGWTAGAAA Y YVGYLQPRTFLLKYNENGTITDAVDCALDPLSETKCTLKSFTVEKGIYQT S NFRVQPTESIVRFPNITNLCPFGEVFNATRFASVYAWNRKRISNCVADYS V LYNSASFSTFKCYGVSPTKLNDLCFTNVYADSFVIRGDEVRQIAPGQTGK I ADYNYKLPDDFTGCVIAWNSNNLDSKVGGNYNYLYRLFRKSNLKPFERD ISTEIYQAGSTPCNGVEGFNCYFPLQSYGFQPTNGVGYQPYRVVVLSFEL L HAPATVCGPKKSTNLVKNKCVNFNFNGLTGTGVLTESNKKFLPFQQFGR DIADTTDAVRDPQTLEILDITPCSFGGVSVITPGTNTSNQVAVLYQGVNC T EVPVAIHADQLTPTWRVYSTGSNVFQTRAGCLIGAEHVNNSYECDIPIGA GICASYQTQTNSPGSASSVASQSIIAYTMSLGAENSVAYSNNSIAIPTNF TIS VTTEILPVSMTKTSVDCTMYICGDSTECSNLLLQYGSFCTQLNRALTGIA V EQDKNTQEVFAQVKQIYKTPPIKDFGGFNFSQILPDPSKPSKRSPIEDLL FN KVTLADAGFIKQYGDCLGDIAARDLICAQKFNGLTVLPPLLTDEMIAQYT SALLAGTITSGWTFGAGPALQIPFPMQMAYRFNGIGVTQNVLYENQKLIA NQFNSAIGKIQDSLSSTPSALGKLQDVVNQNAQALNTLVKQLSSNFGAIS S VLNDILSRLDPPEAEVQIDRLITGRLQSLQTYVTQQLIRAAEIRASANLA AT KMSECVLGQSKRVDFCGKGYHLMSFPQSAPHGVVFLHVTYVPAQEKNFT TAPAICHDGKAHFPREGVFVSNGTHWFVTQRNFYEPQIITTDNTFVSGNC DVVIGIVNNTVYDPLQSELDSIKEELDKIHKNGSGGSGDIIKLLNEQVNK E MQSSNLYMSMSSWCYTHSLDGAGLFLFDHAAEEYEHAKKLIIFLNENNV PVQLTSISAPEHKFEGLTQIFQKAYEHEQHISESINNIVDHAIKSKDHAT FNF LQWYVAEQHEEEVLFKDILDKIELIGNENHGLYLADQYVKGIAKSRKSGS | 171 |
| 1B-08-PL with D614G | pCoV187 | S2P.1158op1x 2-del-Ferritin-D614G | 1,332 | SSQCVNLTTRTQLPPAYTNSFTRGVYYPDKVFRSSVLHSTQDLFLPFFSN V TWFHAIHVSGTNGTKRFDNPVLPFNDGVYFASTEKSNIIRGWIFGTTLDS K TQSLLIVNNATNVVIKVCEFQFCNDPFLGVYYHKNNKSWMESEFRVYSSA NNCTFEYVSQPFLMDLEGKQGNFKNLREFVFKNIDGYFKIYSKHTPINLV R DLPQGFSALEPLVDLPIGINITRFQTLLALHRSYLTPGDSSSGWTAGAAA Y YVGYLQPRTFLLKYNENGTITDAVDCALDPLSETKCTLKSFTVEKGIYQT S NFRVQPTESIVRFPNITNLCPFGEVFNATRFASVYAWNRKRISNCVADYS V LYNSASFSTFKCYGVSPTKLNDLCFTNVYADSFVIRGDEVRQIAPGQTGK I ADYNYKLPDDFTGCVIAWNSNNLDSKVGGNYNYLYRLFRKSNLKPFERD ISTEIYQAGSTPCNGVEGFNCYFPLQSYGFQPTNGVGYQPYRVVVLSFEL L HAPATVCGPKKSTNLVKNKCVNFNFNGLTGTGVLTESNKKFLPFQQFGR DIADTTDAVRDPQTLEILDITPCSFGGVSVITPGTNTSNQVAVLYQGVNC T EVPVAIHADQLTPTWRVYSTGSNVFQTRAGCLIGAEHVNNSYECDIPIGA GICASYQTQTNSPGSASSVASQSIIAYTMSLGAENSVAYSNNSIAIPTNF TIS VTTEILPVSMTKTSVDCTMYICGDSTECSNLLLQYGSFCTQLNRALTGIA V EQDKNTQEVFAQVKQIYKTPPIKDFGGFNFSQILPDPSKPSKRSFIEDLL FN KVTLADAGFIKQYGDCLGDIAARDLICAQKFNGLTVLPPLLTDEMIAQYT SALLAGTITSGWTFGAGAALQIPFAMQMAYRFNGIGVTQNVLYENQKLIA NQFNSAIGKIQDSLSSTASALGKLQDVVNQNAQALNTLVKQLSSNFGAIS S VLNDILSRLDPPEAEVQIDRLITGRLQSLQTYVTQQLIRAAEIRASANLA AT KMSECVLGQSKRVDFCGKGYHLMSFPQSAPHGVVFLHVTYVPAQEKNFT TAPAICHDGKAHFPREGVFVSNGTHWFVTQRNFYEPQIITTDNTFVSGNC DVVIGIVNNTVYDPLQSELDSIKEELDKIHKNLDSIKEELDKIHKNGSGG SG DIIKLLNEQVNKEMQSSNLYMSMSSWCYTHSLDGAGLFLFDHAAEEYEH AKKLIIFLNENNVPVQLTSISAPEHKFEGLTQIFQKAYEHEQHISESINN IVD HAIKSKDHATFNFLQWYVAEQHEEEVLFKDILDKIELIGNENHGLYLADQ YVKGIAKSRKSGS | 172 |
| 1B-08-PL with HexaPro | pCoV188 | S2P-HexaPro.1158 op1x2-del-Ferritin | 1,332 | SSQCVNLTTRTQLPPAYTNSFTRGVYYPDKVFRSSVLHSTQDLFLPFFSN V TWFHAIHVSGTNGTKRFDNPVLPFNDGVYFASTEKSNIIRGWIFGTTLDS K TQSLLIVNNATNVVIKVCEFQFCNDPFLGVYYHKNNKSWMESEFRVYSSA NNCTFEYVSQPFLMDLEGKQGNFKNLREFVFKNIDGYFKIYSKHTPINLV R DLPQGFSALEPLVDLPIGINITRFQTLLALHRSYLTPGDSSSGWTAGAAA Y YVGYLQPRTFLLKYNENGTITDAVDCALDPLSETKCTLKSFTVEKGIYQT S NFRVQPTESIVRFPNITNLCPFGEVFNATRFASVYAWNRKRISNCVADYS V LYNSASFSTFKCYGVSPTKLNDLCFTNVYADSFVIRGDEVRQIAPGQTGK I ADYNYKLPDDFTGCVIAWNSNNLDSKVGGNYNYLYRLFRKSNLKPFERD ISTEIYQAGSTPCNGVEGFNCYFPLQSYGFQPTNGVGYQPYRVVVLSFEL L HAPATVCGPKKSTNLVKNKCVNFNFNGLTGTGVLTESNKKFLPFQQFGR DIADTTDAVRDPQTLEILDITPCSFGGVSVITPGTNTSNQVAVLYQDVNC T EVPVAIHADQLTPTWRVYSTGSNVFQTRAGCLIGAEHVNNSYECDIPIGA GICASYQTQTNSPGSASSVASQSIIAYTMSLGAENSVAYSNNSIAIPTNF TIS VTTEILPVSMTKTSVDCTMYICGDSTECSNLLLQYGSFCTQLNRALTGIA V EQDKNTQEVFAQVKQIYKTPPIKDFGGFNFSQILPDPSKPSKRSPIEDLL FN KVTLADAGFIKQYGDCLGDIAARDLICAQKFNGLTVLPPLLTDEMIAQYT SALLAGTITSGWTFGAGPALQIPFPMQMAYRFNGIGVTQNVLYENQKLIA NQFNSAIGKIQDSLSSTPSALGKLQDVVNQNAQALNTLVKQLSSNFGAIS S VLNDILSRLDPPEAEVQIDRLITGRLQSLQTYVTQQLIRAAEIRASANLA AT KMSECVLGQSKRVDFCGKGYHLMSFPQSAPHGVVFLHVTYVPAQEKNFT TAPAICHDGKAHFPREGVFVSNGTHWFVTQRNFYEPQIITTDNTFVSGNC DVVIGIVNNTVYDPLQSELDSIKEELDKIHKNLDSIKEELDKIHKNGSGG SG DIIKLLNEQVNKEMQSSNLYMSMSSWCYTHSLDGAGLFLFDHAAEEYEH AKKLIIFLNENNVPVQLTSISAPEHKFEGLTQIFQKAYEHEQHISESINN IVD HAIKSKDHATFNFLQWYVAEQHEEEVLFKDILDKIELIGNENHGLYLADQ YVKGIAKSRKSGS | 173 |
| 1B-08-PL with HexaPro + D614G | pCoV189 | S2P-HexaPro.1158 op1x2-del-Ferritin-D614G | 1,332 | SSQCVNLTTRTQLPPAYTNSFTRGVYYPDKVFRSSVLHSTQDLFLPFFSN V TWFHAIHVSGTNGTKRFDNPVLPFNDGVYFASTEKSNIIRGWIFGTTLDS K TQSLLIVNNATNVVIKVCEFQFCNDPFLGVYYHKNNKSWMESEFRVYSSA NNCTFEYVSQPFLMDLEGKQGNFKNLREFVFKNIDGYFKIYSKHTPINLV R DLPQGFSALEPLVDLPIGINITRFQTLLALHRSYLTPGDSSSGWTAGAAA Y YVGYLQPRTFLLKYNENGTITDAVDCALDPLSETKCTLKSFTVEKGIYQT S NFRVQPTESIVRFPNITNLCPFGEVFNATRFASVYAWNRKRISNCVADYS V LYNSASFSTFKCYGVSPTKLNDLCFTNVYADSFVIRGDEVRQIAPGQTGK I ADYNYKLPDDFTGCVIAWNSNNLDSKVGGNYNYLYRLFRKSNLKPFERD ISTEIYQAGSTPCNGVEGFNCYFPLQSYGFQPTNGVGYQPYRVVVLSFEL L HAPATVCGPKKSTNLVKNKCVNFNFNGLTGTGVLTESNKKFLPFQQFGR DIADTTDAVRDPQTLEILDITPCSFGGVSVITPGTNTSNQVAVLYQGVNC T EVPVAIHADQLTPTWRVYSTGSNVFQTRAGCLIGAEHVNNSYECDIPIGA GICASYQTQTNSPGSASSVASQSIIAYTMSLGAENSVAYSNNSIAIPTNF TIS VTTEILPVSMTKTSVDCTMYICGDSTECSNLLLQYGSFCTQLNRALTGIA V EQDKNTQEVFAQVKQIYKTPPIKDFGGFNFSQILPDPSKPSKRSPIEDLL FN KVTLADAGFIKQYGDCLGDIAARDLICAQKFNGLTVLPPLLTDEMIAQYT SALLAGTITSGWTFGAGPALQIPFPMQMAYRFNGIGVTQNVLYENQKLIA NQFNSAIGKIQDSLSSTPSALGKLQDVVNQNAQALNTLVKQLSSNFGAIS S VLNDILSRLDPPEAEVQIDRLITGRLQSLQTYVTQQLIRAAEIRASANLA AT KMSECVLGQSKRVDFCGKGYHLMSFPQSAPHGVVFLHVTYVPAQEKNFT TAPAICHDGKAHFPREGVFVSNGTHWFVTQRNFYEPQIITTDNTFVSGNC DVVIGIVNNTVYDPLQSELDSIKEELDKIHKNLDSIKEELDKIHKNGSGG SG DIIKLLNEQVNKEMQSSNLYMSMSSWCYTHSLDGAGLFLFDHAAEEYEH AKKLIIFLNENNVPVQLTSISAPEHKFEGLTQIFQKAYEHEQHISESINN IVD HAIKSKDHATFNFLQWYVAEQHEEEVLFKDILDKIELIGNENHGLYLADQ YVKGIAKSRKSGS | 174 |
| 1B-05 with D614G | pCoV190 | S2P.1154-del-Ferritin-D614G | 1,310 | VNLTTRTQLPPAYTNSFTRGVYYPDKVFRSSVLHSTQDLFLPFFSNVTWF HAIHVSGTNGTKRFDNPVLPFNDGVYFASTEKSNIIRGWIFGTTLDSKTQ S LLIVNNATNVVIKVCEFQFCNDPFLGVYYHKNNKSWMESEFRVYSSANN CTFEYVSQPFLMDLEGKQGNFKNLREFVFKNIDGYFKIYSKHTPINLVRD L PQGFSALEPLVDLPIGINITRFQTLLALHRSYLTPGDSSSGWTAGAAAYY V GYLQPRTFLLKYNENGTITDAVDCALDPLSETKCTLKSFTVEKGIYQTSN F RVQPTESIVRFPNITNLCPFGEVFNATRFASVYAWNRKRISNCVADYSVL Y NSASFSTFKCYGVSPTKLNDLCFTNVYADSFVIRGDEVRQIAPGQTGKIA D YNYKLPDDFTGCVIAWNSNNLDSKVGGNYNYLYRLFRKSNLKPFERDIST EIYQAGSTPCNGVEGFNCYFPLQSYGFQPTNGVGYQPYRVVVLSFELLHA PATVCGPKKSTNLVKNKCVNFNFNGLTGTGVLTESNKKFLPFQQFGRDIA DTTDAVRDPQTLEILDITPCSFGGVSVITPGTNTSNQVAVLYQGVNCTEV P VAIHADQLTPTWRVYSTGSNVFQTRAGCLIGAEHVNNSYECDIPIGAGIC A SYQTQTNSPGSASSVASQSIIAYTMSLGAENSVAYSNNSIAIPTNFTISV TTE ILPVSMTKTSVDCTMYICGDSTECSNLLLQYGSFCTQLNRALTGIAVEQD K NTQEVFAQVKQIYKTPPIKDFGGFNFSQILPDPSKPSKRSFIEDLLFNKV TL ADAGFIKQYGDCLGDIAARDLICAQKFNGLTVLPPLLTDEMIAQYTSALL AGTITSGWTFGAGAALQIPFAMQMAYRFNGIGVTQNVLYENQKLIANQF NSAIGKIQDSLSSTASALGKLQDVVNQNAQALNTLVKQLSSNFGAISSVL N DILSRLDPPEAEVQIDRLITGRLQSLQTYVTQQLIRAAEIRASANLAATK MS ECVLGQSKRVDFCGKGYHLMSFPQSAPHGVVFLHVTYVPAQEKNFTTAP AICHDGKAHFPREGVFVSNGTHWFVTQRNFYEPQIITTDNTFVSGNCDVV I GIVNNTVYDPLQPELDSFKEELDKGSGGSGDIIKLLNEQVNKEMQSSNLY MSMSSWCYTHSLDGAGLFLFDHAAEEYEHAKKLIIFLNENNVPVQLTSIS APEHKFEGLTQIFQKAYEHEQHISESINNIVDHAIKSKDHATFNFLQWYV A EQHEEEVLFKDILDKIELIGNENHGLYLADQYVKGIAKSRKSGS | 175 |
| 1B-06-PL with DS1 + HexaPro | pCoV191 | S2P-HexaPro.1158 op1-DS1-del-Ferritin | 1,318 | SSQCVNLTTRTQLPPAYTNSFTRGVYYPDKVFRSSVLHSTQDLFLPFFSN V TWFHAIHVSGTNGTKRFDNPVLPFNDGVYFASTEKSNIIRGWIFGTTLDS K TQSLLIVNNATNVVIKVCEFQFCNDPFLGVYYHKNNKSWMESEFRVYSSA NNCTFEYVSQPFLMDLEGKQGNFKNLREFVFKNIDGYFKIYSKHTPINLV R DLPQGFSALEPLVDLPIGINITRFQTLLALHRSYLTPGDSSSGWTAGAAA Y YVGYLQPRTFLLKYNENGTITDAVDCALDPLSETKCTLKSFTVEKGIYQT S NFRVQPTESIVRFPNITNLCPFGEVFNATRFASVYAWNRKRISNCVADYS V LYNSASFSTFKCYGVCPTKLNDLCFTNVYADSFVIRGDEVRQIAPGQTGK I ADYNYKLPDDFTGCVIAWNSNNLDSKVGGNYNYLYRLFRKSNLKPFERD ISTEIYQAGSTPCNGVEGFNCYFPLQSYGFQPTNGVGYQPYRVVVLSFEL L HAPATVCGPKKSTNLVKNKCVNFNFNGLTGTGVLTESNKKFLPFQQFGR DIADTTDAVRDPQTLEILDITPCSFGGVSVITPGTNTSNQVAVLYQDVNC T EVPVAIHADQLTPTWRVYSTGSNVFQTRAGCLIGAEHVNNSYECDIPIGA GICASYQTQTNSPGSASSVASQSIIAYTMSLGAENSVAYSNNSIAIPTNF TIS VTTEILPVSMTKTSVDCTMYICGDSTECSNLLLQYGSFCTQLNRALTGIA V EQDKNTQEVFAQVKQIYKTPPIKDFGGFNFSQILPDPSKPSKRSPIEDLL FN KVTLADAGFIKQYGDCLGDIAARDLICAQKFNGLTVLPPLLTDEMIAQYT SALLAGTITSGWTFGAGPALQIPFPMQMAYRFNGIGVTQNVLYENQKLIA NQFNSAIGKIQDSLSSTPSALGKLQDVVNQNAQALNTLVKQLSSNFGAIS S VLNDILSRLCPPEAEVQIDRLITGRLQSLQTYVTQQLIRAAEIRASANLA AT KMSECVLGQSKRVDFCGKGYHLMSFPQSAPHGVVFLHVTYVPAQEKNFT TAPAICHDGKAHFPREGVFVSNGTHWFVTQRNFYEPQIITTDNTFVSGNC DVVIGIVNNTVYDPLQSELDSIKEELDKIHKNGSGGSGDIIKLLNEQVNK E MQSSNLYMSMSSWCYTHSLDGAGLFLFDHAAEEYEHAKKLIIFLNENNV PVQLTSISAPEHKFEGLTQIFQKAYEHEQHISESINNIVDHAIKSKDHAT FNF LQWYVAEQHEEEVLFKDILDKIELIGNENHGLYLADQYVKGIAKSRKSGS | 176 |
| 1B-06-PL with DS1 + HexaPro + D614G | pCoV192 | S2P-HexaPro.1158 op1-DS1-del-Ferritin-D614G | 1,318 | SSQCVNLTTRTQLPPAYTNSFTRGVYYPDKVFRSSVLHSTQDLFLPFFSN V TWFHAIHVSGTNGTKRFDNPVLPFNDGVYFASTEKSNIIRGWIFGTTLDS K TQSLLIVNNATNVVIKVCEFQFCNDPFLGVYYHKNNKSWMESEFRVYSSA NNCTFEYVSQPFLMDLEGKQGNFKNLREFVFKNIDGYFKIYSKHTPINLV R DLPQGFSALEPLVDLPIGINITRFQTLLALHRSYLTPGDSSSGWTAGAAA Y YVGYLQPRTFLLKYNENGTITDAVDCALDPLSETKCTLKSFTVEKGIYQT S NFRVQPTESIVRFPNITNLCPFGEVFNATRFASVYAWNRKRISNCVADYS V LYNSASFSTFKCYGVCPTKLNDLCFTNVYADSFVIRGDEVRQIAPGQTGK I ADYNYKLPDDFTGCVIAWNSNNLDSKVGGNYNYLYRLFRKSNLKPFERD ISTEIYQAGSTPCNGVEGFNCYFPLQSYGFQPTNGVGYQPYRVVVLSFEL L HAPATVCGPKKSTNLVKNKCVNFNFNGLTGTGVLTESNKKFLPFQQFGR DIADTTDAVRDPQTLEILDITPCSFGGVSVITPGTNTSNQVAVLYQGVNC T EVPVAIHADQLTPTWRVYSTGSNVFQTRAGCLIGAEHVNNSYECDIPIGA GICASYQTQTNSPGSASSVASQSIIAYTMSLGAENSVAYSNNSIAIPTNF TIS VTTEILPVSMTKTSVDCTMYICGDSTECSNLLLQYGSFCTQLNRALTGIA V EQDKNTQEVFAQVKQIYKTPPIKDFGGFNFSQILPDPSKPSKRSPIEDLL FN KVTLADAGFIKQYGDCLGDIAARDLICAQKFNGLTVLPPLLTDEMIAQYT SALLAGTITSGWTFGAGPALQIPFPMQMAYRFNGIGVTQNVLYENQKLIA NQFNSAIGKIQDSLSSTPSALGKLQDVVNQNAQALNTLVKQLSSNFGAIS S VLNDILSRLCPPEAEVQIDRLITGRLQSLQTYVTQQLIRAAEIRASANLA AT KMSECVLGQSKRVDFCGKGYHLMSFPQSAPHGVVFLHVTYVPAQEKNFT TAPAICHDGKAHFPREGVFVSNGTHWFVTQRNFYEPQIITTDNTFVSGNC DVVIGIVNNTVYDPLQSELDSIKEELDKIHKNGSGGSGDIIKLLNEQVNK E MQSSNLYMSMSSWCYTHSLDGAGLFLFDHAAEEYEHAKKLIIFLNENNV PVQLTSISAPEHKFEGLTQIFQKAYEHEQHISESINNIVDHAIKSKDHAT FNF LQWYVAEQHEEEVLFKDILDKIELIGNENHGLYLADQYVKGIAKSRKSGS | 177 |
| 1B-08-PL with DS1 | pCoV193 | S2P.1158op1x 2-DS1-del-Ferritin | 1,332 | SSQCVNLTTRTQLPPAYTNSFTRGVYYPDKVFRSSVLHSTQDLFLPFFSN V TWFHAIHVSGTNGTKRFDNPVLPFNDGVYFASTEKSNIIRGWIFGTTLDS K TQSLLIVNNATNVVIKVCEFQFCNDPFLGVYYHKNNKSWMESEFRVYSSA NNCTFEYVSQPFLMDLEGKQGNFKNLREFVFKNIDGYFKIYSKHTPINLV R DLPQGFSALEPLVDLPIGINITRFQTLLALHRSYLTPGDSSSGWTAGAAA Y YVGYLQPRTFLLKYNENGTITDAVDCALDPLSETKCTLKSFTVEKGIYQT S NFRVQPTESIVRFPNITNLCPFGEVFNATRFASVYAWNRKRISNCVADYS V LYNSASFSTFKCYGVCPTKLNDLCFTNVYADSFVIRGDEVRQIAPGQTGK I ADYNYKLPDDFTGCVIAWNSNNLDSKVGGNYNYLYRLFRKSNLKPFERD ISTEIYQAGSTPCNGVEGFNCYFPLQSYGFQPTNGVGYQPYRVVVLSFEL L HAPATVCGPKKSTNLVKNKCVNFNFNGLTGTGVLTESNKKFLPFQQFGR DIADTTDAVRDPQTLEILDITPCSFGGVSVITPGTNTSNQVAVLYQDVNC T EVPVAIHADQLTPTWRVYSTGSNVFQTRAGCLIGAEHVNNSYECDIPIGA GICASYQTQTNSPGSASSVASQSIIAYTMSLGAENSVAYSNNSIAIPTNF TIS VTTEILPVSMTKTSVDCTMYICGDSTECSNLLLQYGSFCTQLNRALTGIA V EQDKNTQEVFAQVKQIYKTPPIKDFGGFNFSQILPDPSKPSKRSFIEDLL FN KVTLADAGFIKQYGDCLGDIAARDLICAQKFNGLTVLPPLLTDEMIAQYT SALLAGTITSGWTFGAGAALQIPFAMQMAYRFNGIGVTQNVLYENQKLIA NQFNSAIGKIQDSLSSTASALGKLQDVVNQNAQALNTLVKQLSSNFGAIS S VLNDILSRLCPPEAEVQIDRLITGRLQSLQTYVTQQLIRAAEIRASANLA AT KMSECVLGQSKRVDFCGKGYHLMSFPQSAPHGVVFLHVTYVPAQEKNFT TAPAICHDGKAHFPREGVFVSNGTHWFVTQRNFYEPQIITTDNTFVSGNC DVVIGIVNNTVYDPLQSELDSIKEELDKIHKNLDSIKEELDKIHKNGSGG SG DIIKLLNEQVNKEMQSSNLYMSMSSWCYTHSLDGAGLFLFDHAAEEYEH AKKLIIFLNENNVPVQLTSISAPEHKFEGLTQIFQKAYEHEQHISESINN IVD HAIKSKDHATFNFLQWYVAEQHEEEVLFKDILDKIELIGNENHGLYLADQ YVKGIAKSRKSGS | 178 |
| 1B-05 with HexaPro + D614G | pCoV194 | S2P-HexaPro.1154-del-Ferritin-D614G | 1,310 | VNLTTRTQLPPAYTNSFTRGVYYPDKVFRSSVLHSTQDLFLPFFSNVTWF HAIHVSGTNGTKRFDNPVLPFNDGVYFASTEKSNIIRGWIFGTTLDSKTQ S LLIVNNATNVVIKVCEFQFCNDPFLGVYYHKNNKSWMESEFRVYSSANN CTFEYVSQPFLMDLEGKQGNFKNLREFVFKNIDGYFKIYSKHTPINLVRD L PQGFSALEPLVDLPIGINITRFQTLLALHRSYLTPGDSSSGWTAGAAAYY V GYLQPRTFLLKYNENGTITDAVDCALDPLSETKCTLKSFTVEKGIYQTSN F RVQPTESIVRFPNITNLCPFGEVFNATRFASVYAWNRKRISNCVADYSVL Y NSASFSTFKCYGVSPTKLNDLCFTNVYADSFVIRGDEVRQIAPGQTGKIA D YNYKLPDDFTGCVIAWNSNNLDSKVGGNYNYLYRLFRKSNLKPFERDIST EIYQAGSTPCNGVEGFNCYFPLQSYGFQPTNGVGYQPYRVVVLSFELLHA PATVCGPKKSTNLVKNKCVNFNFNGLTGTGVLTESNKKFLPFQQFGRDIA DTTDAVRDPQTLEILDITPCSFGGVSVITPGTNTSNQVAVLYQGVNCTEV P VAIHADQLTPTWRVYSTGSNVFQTRAGCLIGAEHVNNSYECDIPIGAGIC A SYQTQTNSPGSASSVASQSIIAYTMSLGAENSVAYSNNSIAIPTNFTISV TTE ILPVSMTKTSVDCTMYICGDSTECSNLLLQYGSFCTQLNRALTGIAVEQD K NTQEVFAQVKQIYKTPPIKDFGGFNFSQILPDPSKPSKRSPIEDLLFNKV TL ADAGFIKQYGDCLGDIAARDLICAQKFNGLTVLPPLLTDEMIAQYTSALL AGTITSGWTFGAGPALQIPFPMQMAYRFNGIGVTQNVLYENQKLIANQFN SAIGKIQDSLSSTPSALGKLQDVVNQNAQALNTLVKQLSSNFGAISSVLN D ILSRLDPPEAEVQIDRLITGRLQSLQTYVTQQLIRAAEIRASANLAATKM SE CVLGQSKRVDFCGKGYHLMSFPQSAPHGVVFLHVTYVPAQEKNFTTAPA ICHDGKAHFPREGVFVSNGTHWFVTQRNFYEPQIITTDNTFVSGNCDVVI G IVNNTVYDPLQPELDSFKEELDKGSGGSGDIIKLLNEQVNKEMQSSNLYM SMSSWCYTHSLDGAGLFLFDHAAEEYEHAKKLIIFLNENNVPVQLTSISA P EHKFEGLTQIFQKAYEHEQHISESINNIVDHAIKSKDHATFNFLQWYVAE Q HEEEVLFKDILDKIELIGNENHGLYLADQYVKGIAKSRKSGS | 179 |
| 1B-05 with DS1 + HexaPro | pCoV195 | S2P-HexaPro.1154-DS1-del-Ferritin | 1,310 | VNLTTRTQLPPAYTNSFTRGVYYPDKVFRSSVLHSTQDLFLPFFSNVTWF HAIHVSGTNGTKRFDNPVLPFNDGVYFASTEKSNIIRGWIFGTTLDSKTQ S LLIVNNATNVVIKVCEFQFCNDPFLGVYYHKNNKSWMESEFRVYSSANN CTFEYVSQPFLMDLEGKQGNFKNLREFVFKNIDGYFKIYSKHTPINLVRD L PQGFSALEPLVDLPIGINITRFQTLLALHRSYLTPGDSSSGWTAGAAAYY V GYLQPRTFLLKYNENGTITDAVDCALDPLSETKCTLKSFTVEKGIYQTSN F RVQPTESIVRFPNITNLCPFGEVFNATRFASVYAWNRKRISNCVADYSVL Y NSASFSTFKCYGVCPTKLNDLCFTNVYADSFVIRGDEVRQIAPGQTGKIA D YNYKLPDDFTGCVIAWNSNNLDSKVGGNYNYLYRLFRKSNLKPFERDIST EIYQAGSTPCNGVEGFNCYFPLQSYGFQPTNGVGYQPYRVVVLSFELLHA PATVCGPKKSTNLVKNKCVNFNFNGLTGTGVLTESNKKFLPFQQFGRDIA DTTDAVRDPQTLEILDITPCSFGGVSVITPGTNTSNQVAVLYQDVNCTEV P VAIHADQLTPTWRVYSTGSNVFQTRAGCLIGAEHVNNSYECDIPIGAGIC A SYQTQTNSPGSASSVASQSIIAYTMSLGAENSVAYSNNSIAIPTNFTISV TTE ILPVSMTKTSVDCTMYICGDSTECSNLLLQYGSFCTQLNRALTGIAVEQD K NTQEVFAQVKQIYKTPPIKDFGGFNFSQILPDPSKPSKRSPIEDLLFNKV TL ADAGFIKQYGDCLGDIAARDLICAQKFNGLTVLPPLLTDEMIAQYTSALL AGTITSGWTFGAGPALQIPFPMQMAYRFNGIGVTQNVLYENQKLIANQFN SAIGKIQDSLSSTPSALGKLQDVVNQNAQALNTLVKQLSSNFGAISSVLN D ILSRLCPPEAEVQIDRLITGRLQSLQTYVTQQLIRAAEIRASANLAATKM SE CVLGQSKRVDFCGKGYHLMSFPQSAPHGVVFLHVTYVPAQEKNFTTAPA ICHDGKAHFPREGVFVSNGTHWFVTQRNFYEPQIITTDNTFVSGNCDVVI G IVNNTVYDPLQPELDSFKEELDKGSGGSGDIIKLLNEQVNKEMQSSNLYM SMSSWCYTHSLDGAGLFLFDHAAEEYEHAKKLIIFLNENNVPVQLTSISA P EHKFEGLTQIFQKAYEHEQHISESINNIVDHAIKSKDHATFNFLQWYVAE Q HEEEVLFKDILDKIELIGNENHGLYLADQYVKGIAKSRKSGS | 180 |
| 1B-05 with DS1 + HexaPro + D614G | pCoV196 | S2P-HexaPro.1154-DS1-del-Ferritin-D614G | 1,310 | VNLTTRTQLPPAYTNSFTRGVYYPDKVFRSSVLHSTQDLFLPFFSNVTWF HAIHVSGTNGTKRFDNPVLPFNDGVYFASTEKSNIIRGWIFGTTLDSKTQ S LLIVNNATNVVIKVCEFQFCNDPFLGVYYHKNNKSWMESEFRVYSSANN CTFEYVSQPFLMDLEGKQGNFKNLREFVFKNIDGYFKIYSKHTPINLVRD L PQGFSALEPLVDLPIGINITRFQTLLALHRSYLTPGDSSSGWTAGAAAYY V GYLQPRTFLLKYNENGTITDAVDCALDPLSETKCTLKSFTVEKGIYQTSN F RVQPTESIVRFPNITNLCPFGEVFNATRFASVYAWNRKRISNCVADYSVL Y NSASFSTFKCYGVCPTKLNDLCFTNVYADSFVIRGDEVRQIAPGQTGKIA D YNYKLPDDFTGCVIAWNSNNLDSKVGGNYNYLYRLFRKSNLKPFERDIST EIYQAGSTPCNGVEGFNCYFPLQSYGFQPTNGVGYQPYRVVVLSFELLHA PATVCGPKKSTNLVKNKCVNFNFNGLTGTGVLTESNKKFLPFQQFGRDIA DTTDAVRDPQTLEILDITPCSFGGVSVITPGTNTSNQVAVLYQGVNCTEV P VAIHADQLTPTWRVYSTGSNVFQTRAGCLIGAEHVNNSYECDIPIGAGIC A SYQTQTNSPGSASSVASQSIIAYTMSLGAENSVAYSNNSIAIPTNFTISV TTE ILPVSMTKTSVDCTMYICGDSTECSNLLLQYGSFCTQLNRALTGIAVEQD K NTQEVFAQVKQIYKTPPIKDFGGFNFSQILPDPSKPSKRSPIEDLLFNKV TL ADAGFIKQYGDCLGDIAARDLICAQKFNGLTVLPPLLTDEMIAQYTSALL AGTITSGWTFGAGPALQIPFPMQMAYRFNGIGVTQNVLYENQKLIANQFN SAIGKIQDSLSSTPSALGKLQDVVNQNAQALNTLVKQLSSNFGAISSVLN D ILSRLCPPEAEVQIDRLITGRLQSLQTYVTQQLIRAAEIRASANLAATKM SE CVLGQSKRVDFCGKGYHLMSFPQSAPHGVVFLHVTYVPAQEKNFTTAPA ICHDGKAHFPREGVFVSNGTHWFVTQRNFYEPQIITTDNTFVSGNCDVVI G IVNNTVYDPLQPELDSFKEELDKGSGGSGDIIKLLNEQVNKEMQSSNLYM SMSSWCYTHSLDGAGLFLFDHAAEEYEHAKKLIIFLNENNVPVQLTSISA P EHKFEGLTQIFQKAYEHEQHISESINNIVDHAIKSKDHATFNFLQWYVAE Q HEEEVLFKDILDKIELIGNENHGLYLADQYVKGIAKSRKSGS | 181 |
| 1B-08-PL with DS1 + HexaPro | pCoV197 | S2P-HexaPro.1158 op1x2-DS1-del-Ferritin | 1,332 | SSQCVNLTTRTQLPPAYTNSFTRGVYYPDKVFRSSVLHSTQDLFLPFFSN V TWFHAIHVSGTNGTKRFDNPVLPFNDGVYFASTEKSNIIRGWIFGTTLDS K TQSLLIVNNATNVVIKVCEFQFCNDPFLGVYYHKNNKSWMESEFRVYSSA NNCTFEYVSQPFLMDLEGKQGNFKNLREFVFKNIDGYFKIYSKHTPINLV R DLPQGFSALEPLVDLPIGINITRFQTLLALHRSYLTPGDSSSGWTAGAAA Y YVGYLQPRTFLLKYNENGTITDAVDCALDPLSETKCTLKSFTVEKGIYQT S NFRVQPTESIVRFPNITNLCPFGEVFNATRFASVYAWNRKRISNCVADYS V LYNSASFSTFKCYGVCPTKLNDLCFTNVYADSFVIRGDEVRQIAPGQTGK I ADYNYKLPDDFTGCVIAWNSNNLDSKVGGNYNYLYRLFRKSNLKPFERD ISTEIYQAGSTPCNGVEGFNCYFPLQSYGFQPTNGVGYQPYRVVVLSFEL L HAPATVCGPKKSTNLVKNKCVNFNFNGLTGTGVLTESNKKFLPFQQFGR DIADTTDAVRDPQTLEILDITPCSFGGVSVITPGTNTSNQVAVLYQDVNC T EVPVAIHADQLTPTWRVYSTGSNVFQTRAGCLIGAEHVNNSYECDIPIGA GICASYQTQTNSPGSASSVASQSIIAYTMSLGAENSVAYSNNSIAIPTNF TIS VTTEILPVSMTKTSVDCTMYICGDSTECSNLLLQYGSFCTQLNRALTGIA V EQDKNTQEVFAQVKQIYKTPPIKDFGGFNFSQILPDPSKPSKRSPIEDLL FN KVTLADAGFIKQYGDCLGDIAARDLICAQKFNGLTVLPPLLTDEMIAQYT SALLAGTITSGWTFGAGPALQIPFPMQMAYRFNGIGVTQNVLYENQKLIA NQFNSAIGKIQDSLSSTPSALGKLQDVVNQNAQALNTLVKQLSSNFGAIS S VLNDILSRLCPPEAEVQIDRLITGRLQSLQTYVTQQLIRAAEIRASANLA AT KMSECVLGQSKRVDFCGKGYHLMSFPQSAPHGVVFLHVTYVPAQEKNFT TAPAICHDGKAHFPREGVFVSNGTHWFVTQRNFYEPQIITTDNTFVSGNC DVVIGIVNNTVYDPLQSELDSIKEELDKIHKNLDSIKEELDKIHKNGSGG SG DIIKLLNEQVNKEMQSSNLYMSMSSWCYTHSLDGAGLFLFDHAAEEYEH AKKLIIFLNENNVPVQLTSISAPEHKFEGLTQIFQKAYEHEQHISESINN IVD HAIKSKDHATFNFLQWYVAEQHEEEVLFKDILDKIELIGNENHGLYLADQ YVKGIAKSRKSGS | 182 |
| 1B-08-PL with DS1 + HexaPro + D614G | pCoV198 | S2P-HexaPro.1158 op1x2-DS1-del-Ferritin-D614G | 1,332 | SSQCVNLTTRTQLPPAYTNSFTRGVYYPDKVFRSSVLHSTQDLFLPFFSN V TWFHAIHVSGTNGTKRFDNPVLPFNDGVYFASTEKSNIIRGWIFGTTLDS K TQSLLIVNNATNVVIKVCEFQFCNDPFLGVYYHKNNKSWMESEFRVYSSA NNCTFEYVSQPFLMDLEGKQGNFKNLREFVFKNIDGYFKIYSKHTPINLV R DLPQGFSALEPLVDLPIGINITRFQTLLALHRSYLTPGDSSSGWTAGAAA Y YVGYLQPRTFLLKYNENGTITDAVDCALDPLSETKCTLKSFTVEKGIYQT S NFRVQPTESIVRFPNITNLCPFGEVFNATRFASVYAWNRKRISNCVADYS V LYNSASFSTFKCYGVCPTKLNDLCFTNVYADSFVIRGDEVRQIAPGQTGK I ADYNYKLPDDFTGCVIAWNSNNLDSKVGGNYNYLYRLFRKSNLKPFERD ISTEIYQAGSTPCNGVEGFNCYFPLQSYGFQPTNGVGYQPYRVVVLSFEL L HAPATVCGPKKSTNLVKNKCVNFNFNGLTGTGVLTESNKKFLPFQQFGR DIADTTDAVRDPQTLEILDITPCSFGGVSVITPGTNTSNQVAVLYQGVNC T EVPVAIHADQLTPTWRVYSTGSNVFQTRAGCLIGAEHVNNSYECDIPIGA GICASYQTQTNSPGSASSVASQSIIAYTMSLGAENSVAYSNNSIAIPTNF TIS VTTEILPVSMTKTSVDCTMYICGDSTECSNLLLQYGSFCTQLNRALTGIA V EQDKNTQEVFAQVKQIYKTPPIKDFGGFNFSQILPDPSKPSKRSPIEDLL FN KVTLADAGFIKQYGDCLGDIAARDLICAQKFNGLTVLPPLLTDEMIAQYT SALLAGTITSGWTFGAGPALQIPFPMQMAYRFNGIGVTQNVLYENQKLIA NQFNSAIGKIQDSLSSTPSALGKLQDVVNQNAQALNTLVKQLSSNFGAIS S VLNDILSRLCPPEAEVQIDRLITGRLQSLQTYVTQQLIRAAEIRASANLA AT KMSECVLGQSKRVDFCGKGYHLMSFPQSAPHGVVFLHVTYVPAQEKNFT TAPAICHDGKAHFPREGVFVSNGTHWFVTQRNFYEPQIITTDNTFVSGNC DVVIGIVNNTVYDPLQSELDSIKEELDKIHKNLDSIKEELDKIHKNGSGG SG DIIKLLNEQVNKEMQSSNLYMSMSSWCYTHSLDGAGLFLFDHAAEEYEH AKKLIIFLNENNVPVQLTSISAPEHKFEGLTQIFQKAYEHEQHISESINN IVD HAIKSKDHATFNFLQWYVAEQHEEEVLFKDILDKIELIGNENHGLYLADQ YVKGIAKSRKSGS | 183 |
| Combine 50 and 53 | pCoV199 | His8-3c-RBD-Ferritin-Y453R/L455R /Y449K/F490R | 396 | HHHHHHHHGPLEVLFQGPNITNLCPFGEVFNATRFASVYAWNRKRISNCV ADYSVLYNSASFSTFKCYGVSPTKLNDLCFTNVYADSFVIRGDEVRQIAP GQTGKIADYNYKLPDDFTGCVIAWNSNNLDSKVGGNKNYLRRRFRKSNL KPFERDISTEIYQAGSTPCNGVEGFNCYRPLQSYGFQPTNGVGYQPYRVV VLSFELLHAPATVCGPGSGGGGESQVRQQFSKDIEKLLNEQVNKEMQSSN LYMSMSSWCYTHSLDGAGLFLFDHAAEEYEHAKKLIIFLNENNVPVQLTS ISAPEHKFEGLTQIFQKAYEHEQHISESINNIVDHAIKSKDHATFNFLQW YV AEQHEEEVLFKDILDKIELIGNENHGLYLADQYVKGIAKSRKSGS | 184 |
| 50, but with a 490A instead of a490R | pCoV200 | His8-3c-RBD-Ferritin-L455R/Y449K/F490A | 396 | HHHHHHHHGPLEVLFQGPNITNLCPFGEVFNATRFASVYAWNRKRISNCV ADYSVLYNSASFSTFKCYGVSPTKLNDLCFTNVYADSFVIRGDEVRQIAP GQTGKIADYNYKLPDDFTGCVIAWNSNNLDSKVGGNKNYLYRRFRKSNL KPFERDISTEIYQAGSTPCNGVEGFNCYAPLQSYGFQPTNGVGYQPYRVV VLSFELLHAPATVCGPGSGGGGESQVRQQFSKDIEKLLNEQVNKEMQSSN LYMSMSSWCYTHSLDGAGLFLFDHAAEEYEHAKKLIIFLNENNVPVQLTS ISAPEHKFEGLTQIFQKAYEHEQHISESINNIVDHAIKSKDHATFNFLQW YV AEQHEEEVLFKDILDKIELIGNENHGLYLADQYVKGIAKSRKSGS | 185 |
| 1B-05 with PP reverted to KV | pCoV201 | S2P.1154-KV-del-Ferritin | 1,310 | VNLTTRTQLPPAYTNSFTRGVYYPDKVFRSSVLHSTQDLFLPFFSNVTWF HAIHVSGTNGTKRFDNPVLPFNDGVYFASTEKSNIIRGWIFGTTLDSKTQ S LLIVNNATNVVIKVCEFQFCNDPFLGVYYHKNNKSWMESEFRVYSSANN CTFEYVSQPFLMDLEGKQGNFKNLREFVFKNIDGYFKIYSKHTPINLVRD L PQGFSALEPLVDLPIGINITRFQTLLALHRSYLTPGDSSSGWTAGAAAYY V GYLQPRTFLLKYNENGTITDAVDCALDPLSETKCTLKSFTVEKGIYQTSN F RVQPTESIVRFPNITNLCPFGEVFNATRFASVYAWNRKRISNCVADYSVL Y NSASFSTFKCYGVSPTKLNDLCFTNVYADSFVIRGDEVRQIAPGQTGKIA D YNYKLPDDFTGCVIAWNSNNLDSKVGGNYNYLYRLFRKSNLKPFERDIST EIYQAGSTPCNGVEGFNCYFPLQSYGFQPTNGVGYQPYRVVVLSFELLHA PATVCGPKKSTNLVKNKCVNFNFNGLTGTGVLTESNKKFLPFQQFGRDIA DTTDAVRDPQTLEILDITPCSFGGVSVITPGTNTSNQVAVLYQDVNCTEV P VAIHADQLTPTWRVYSTGSNVFQTRAGCLIGAEHVNNSYECDIPIGAGIC A SYQTQTNSPGSASSVASQSIIAYTMSLGAENSVAYSNNSIAIPTNFTISV TTE ILPVSMTKTSVDCTMYICGDSTECSNLLLQYGSFCTQLNRALTGIAVEQD K NTQEVFAQVKQIYKTPPIKDFGGFNFSQILPDPSKPSKRSFIEDLLFNKV TL ADAGFIKQYGDCLGDIAARDLICAQKFNGLTVLPPLLTDEMIAQYTSALL AGTITSGWTFGAGAALQIPFAMQMAYRFNGIGVTQNVLYENQKLIANQF NSAIGKIQDSLSSTASALGKLQDVVNQNAQALNTLVKQLSSNFGAISSVL N DILSRLDKVEAEVQIDRLITGRLQSLQTYVTQQLIRAAEIRASANLAATK M SECVLGQSKRVDFCGKGYHLMSFPQSAPHGVVFLHVTYVPAQEKNFTTA PAICHDGKAHFPREGVFVSNGTHWFVTQRNFYEPQIITTDNTFVSGNCDV VIGIVNNTVYDPLQPELDSFKEELDKGSGGSGDIIKLLNEQVNKEMQSSN L YMSMSSWCYTHSLDGAGLFLFDHAAEEYEHAKKLIIFLNENNVPVQLTSI SAPEHKFEGLTQIFQKAYEHEQHISESINNIVDHAIKSKDHATFNFLQWY V AEQHEEEVLFKDILDKIELIGNENHGLYLADQYVKGIAKSRKSGS | 186 |
| 1B-06-PL with PP reverted to KV | pCoV202 | S2P.1158op1-KV-del-Ferritin | 1,318 | SSQCVNLTTRTQLPPAYTNSFTRGVYYPDKVFRSSVLHSTQDLFLPFFSN V TWFHAIHVSGTNGTKRFDNPVLPFNDGVYFASTEKSNIIRGWIFGTTLDS K TQSLLIVNNATNVVIKVCEFQFCNDPFLGVYYHKNNKSWMESEFRVYSSA NNCTFEYVSQPFLMDLEGKQGNFKNLREFVFKNIDGYFKIYSKHTPINLV R DLPQGFSALEPLVDLPIGINITRFQTLLALHRSYLTPGDSSSGWTAGAAA Y YVGYLQPRTFLLKYNENGTITDAVDCALDPLSETKCTLKSFTVEKGIYQT S NFRVQPTESIVRFPNITNLCPFGEVFNATRFASVYAWNRKRISNCVADYS V LYNSASFSTFKCYGVSPTKLNDLCFTNVYADSFVIRGDEVRQIAPGQTGK I ADYNYKLPDDFTGCVIAWNSNNLDSKVGGNYNYLYRLFRKSNLKPFERD ISTEIYQAGSTPCNGVEGFNCYFPLQSYGFQPTNGVGYQPYRVVVLSFEL L HAPATVCGPKKSTNLVKNKCVNFNFNGLTGTGVLTESNKKFLPFQQFGR DIADTTDAVRDPQTLEILDITPCSFGGVSVITPGTNTSNQVAVLYQDVNC T EVPVAIHADQLTPTWRVYSTGSNVFQTRAGCLIGAEHVNNSYECDIPIGA GICASYQTQTNSPGSASSVASQSIIAYTMSLGAENSVAYSNNSIAIPTNF TIS VTTEILPVSMTKTSVDCTMYICGDSTECSNLLLQYGSFCTQLNRALTGIA V EQDKNTQEVFAQVKQIYKTPPIKDFGGFNFSQILPDPSKPSKRSFIEDLL FN KVTLADAGFIKQYGDCLGDIAARDLICAQKFNGLTVLPPLLTDEMIAQYT SALLAGTITSGWTFGAGAALQIPFAMQMAYRFNGIGVTQNVLYENQKLIA NQFNSAIGKIQDSLSSTASALGKLQDVVNQNAQALNTLVKQLSSNFGAIS S VLNDILSRLDKVEAEVQIDRLITGRLQSLQTYVTQQLIRAAEIRASANLA A TKMSECVLGQSKRVDFCGKGYHLMSFPQSAPHGVVFLHVTYVPAQEKNF TTAPAICHDGKAHFPREGVFVSNGTHWFVTQRNFYEPQIITTDNTFVSGN C DVVIGIVNNTVYDPLQSELDSIKEELDKIHKNGSGGSGDIIKLLNEQVNK E MQSSNLYMSMSSWCYTHSLDGAGLFLFDHAAEEYEHAKKLIIFLNENNV PVQLTSISAPEHKFEGLTQIFQKAYEHEQHISESINNIVDHAIKSKDHAT FNF LQWYVAEQHEEEVLFKDILDKIELIGNENHGLYLADQYVKGIAKSRKSGS | 187 |
| 1B-08-PL with PP reverted to KV | pCoV203 | S2P.1158op1x 2-KV-del-Ferritin | 1,332 | SSQCVNLTTRTQLPPAYTNSFTRGVYYPDKVFRSSVLHSTQDLFLPFFSN V TWFHAIHVSGTNGTKRFDNPVLPFNDGVYFASTEKSNIIRGWIFGTTLDS K TQSLLIVNNATNVVIKVCEFQFCNDPFLGVYYHKNNKSWMESEFRVYSSA NNCTFEYVSQPFLMDLEGKQGNFKNLREFVFKNIDGYFKIYSKHTPINLV R DLPQGFSALEPLVDLPIGINITRFQTLLALHRSYLTPGDSSSGWTAGAAA Y YVGYLQPRTFLLKYNENGTITDAVDCALDPLSETKCTLKSFTVEKGIYQT S NFRVQPTESIVRFPNITNLCPFGEVFNATRFASVYAWNRKRISNCVADYS V LYNSASFSTFKCYGVSPTKLNDLCFTNVYADSFVIRGDEVRQIAPGQTGK I ADYNYKLPDDFTGCVIAWNSNNLDSKVGGNYNYLYRLFRKSNLKPFERD ISTEIYQAGSTPCNGVEGFNCYFPLQSYGFQPTNGVGYQPYRVVVLSFEL L HAPATVCGPKKSTNLVKNKCVNFNFNGLTGTGVLTESNKKFLPFQQFGR DIADTTDAVRDPQTLEILDITPCSFGGVSVITPGTNTSNQVAVLYQDVNC T EVPVAIHADQLTPTWRVYSTGSNVFQTRAGCLIGAEHVNNSYECDIPIGA GICASYQTQTNSPGSASSVASQSIIAYTMSLGAENSVAYSNNSIAIPTNF TIS VTTEILPVSMTKTSVDCTMYICGDSTECSNLLLQYGSFCTQLNRALTGIA V EQDKNTQEVFAQVKQIYKTPPIKDFGGFNFSQILPDPSKPSKRSFIEDLL FN KVTLADAGFIKQYGDCLGDIAARDLICAQKFNGLTVLPPLLTDEMIAQYT SALLAGTITSGWTFGAGAALQIPFAMQMAYRFNGIGVTQNVLYENQKLIA NQFNSAIGKIQDSLSSTASALGKLQDVVNQNAQALNTLVKQLSSNFGAIS S VLNDILSRLDKVEAEVQIDRLITGRLQSLQTYVTQQLIRAAEIRASANLA A TKMSECVLGQSKRVDFCGKGYHLMSFPQSAPHGVVFLHVTYVPAQEKNF TTAPAICHDGKAHFPREGVFVSNGTHWFVTQRNFYEPQIITTDNTFVSGN C DVVIGIVNNTVYDPLQSELDSIKEELDKIHKNLDSIKEELDKIHKNGSGG SG DIIKLLNEQVNKEMQSSNLYMSMSSWCYTHSLDGAGLFLFDHAAEEYEH AKKLIIFLNENNVPVQLTSISAPEHKFEGLTQIFQKAYEHEQHISESINN IVD HAIKSKDHATFNFLQWYVAEQHEEEVLFKDILDKIELIGNENHGLYLADQ YVKGIAKSRKSGS | 188 |
| | pCoV122-notag | RBD-GSGGSG-NTD-SSQC-Ferrritin (from domain fusion sheet) | 694 | NITNLCPFGEVFNATRFASVYAWNRKRISNCVADYSVLYNSASFSTFKCY GVSPTKLNDLCFTNVYADSFVIRGDEVRQIAPGQTGKIADYNYKLPDDFT GCVIAWNSNNLDSKVGGNYNYLYRLFRKSNLKPFERDISTEIYQAGSTPC NGVEGFNCYFPLQSYGFQPTNGVGYQPYRVVVLSFELLHAPATVCGPGS GGSGSSQCVNLTTRTQLPPAYTNSFTRGVYYPDKVFRSSVLHSTQDLFLP F FSNVTWFHAIHVSGTNGTKRFDNPVLPFNDGVYFASTEKSNIIRGWIFGT T LDSKTQSLLIVNNATNVVIKVCEFQFCNDPFLGVYYHKNNKSWMESEFR VYSSANNCTFEYVSQPFLMDLEGKQGNFKNLREFVFKNIDGYFKIYSKHT PINLVRDLPQGFSALEPLVDLPIGINITRFQTLLALHRSYLTPGDSSSGW TA GAAAYYVGYLQPRTFLLKYNENGTITDAVDCALDPLSETKCTLGSGGGG ESQVRQQFSKDIEKLLNEQVNKEMQSSNLYMSMSSWCYTHSLDGAGLFL FDHAAEEYEHAKKLIIFLNENNVPVQLTSISAPEHKFEGLTQIFQKAYEH E QHISESINNIVDHAIKSKDHATFNFLQWYVAEQHEEEVLFKDILDKIELI GN ENHGLYLADQYVKGIAKSRKSGS | 189 |
| | pCoV123-notag | RBD-F490R-GSGGSG-NTD-SSQC-Ferrritin | 694 | NITNLCPFGEVFNATRFASVYAWNRKRISNCVADYSVLYNSASFSTFKCY GVSPTKLNDLCFTNVYADSFVIRGDEVRQIAPGQTGKIADYNYKLPDDFT GCVIAWNSNNLDSKVGGNYNYLYRLFRKSNLKPFERDISTEIYQAGSTPC NGVEGFNCYRPLQSYGFQPTNGVGYQPYRVVVLSFELLHAPATVCGPGS GGSGSSQCVNLTTRTQLPPAYTNSFTRGVYYPDKVFRSSVLHSTQDLFLP F FSNVTWFHAIHVSGTNGTKRFDNPVLPFNDGVYFASTEKSNIIRGWIFGT T LDSKTQSLLIVNNATNVVIKVCEFQFCNDPFLGVYYHKNNKSWMESEFR VYSSANNCTFEYVSQPFLMDLEGKQGNFKNLREFVFKNIDGYFKIYSKHT PINLVRDLPQGFSALEPLVDLPIGINITRFQTLLALHRSYLTPGDSSSGW TA GAAAYYVGYLQPRTFLLKYNENGTITDAVDCALDPLSETKCTLGSGGGG ESQVRQQFSKDIEKLLNEQVNKEMQSSNLYMSMSSWCYTHSLDGAGLFL FDHAAEEYEHAKKLIIFLNENNVPVQLTSISAPEHKFEGLTQIFQKAYEH E QHISESINNIVDHAIKSKDHATFNFLQWYVAEQHEEEVLFKDILDKIELI GN ENHGLYLADQYVKGIAKSRKSGS | 190 |
| | pCoV124-notag | RBD-F490A-GSGGSG-NTD-SSQC-Ferrritin | 694 | NITNLCPFGEVFNATRFASVYAWNRKRISNCVADYSVLYNSASFSTFKCY GVSPTKLNDLCFTNVYADSFVIRGDEVRQIAPGQTGKIADYNYKLPDDFT GCVIAWNSNNLDSKVGGNYNYLYRLFRKSNLKPFERDISTEIYQAGSTPC NGVEGFNCYAPLQSYGFQPTNGVGYQPYRVVVLSFELLHAPATVCGPGS GGSGSSQCVNLTTRTQLPPAYTNSFTRGVYYPDKVFRSSVLHSTQDLFLP F FSNVTWFHAIHVSGTNGTKRFDNPVLPFNDGVYFASTEKSNIIRGWIFGT T LDSKTQSLLIVNNATNVVIKVCEFQFCNDPFLGVYYHKNNKSWMESEFR VYSSANNCTFEYVSQPFLMDLEGKQGNFKNLREFVFKNIDGYFKIYSKHT PINLVRDLPQGFSALEPLVDLPIGINITRFQTLLALHRSYLTPGDSSSGW TA GAAAYYVGYLQPRTFLLKYNENGTITDAVDCALDPLSETKCTLGSGGGG ESQVRQQFSKDIEKLLNEQVNKEMQSSNLYMSMSSWCYTHSLDGAGLFL FDHAAEEYEHAKKLIIFLNENNVPVQLTSISAPEHKFEGLTQIFQKAYEH E QHISESINNIVDHAIKSKDHATFNFLQWYVAEQHEEEVLFKDILDKIELI GN ENHGLYLADQYVKGIAKSRKSGS | 191 |
| | pCoV125-notag | RBD-518LLH to NKS-GSGGSG-NTD-SSQC-Ferrritin | 694 | NITNLCPFGEVFNATRFASVYAWNRKRISNCVADYSVLYNSASFSTFKCY GVSPTKLNDLCFTNVYADSFVIRGDEVRQIAPGQTGKIADYNYKLPDDFT GCVIAWNSNNLDSKVGGNYNYLYRLFRKSNLKPFERDISTEIYQAGSTPC NGVEGFNCYFPLQSYGFQPTNGVGYQPYRVVVLSFENKSAPATVCGPGS GGSGSSQCVNLTTRTQLPPAYTNSFTRGVYYPDKVFRSSVLHSTQDLFLP F FSNVTWFHAIHVSGTNGTKRFDNPVLPFNDGVYFASTEKSNIIRGWIFGT T LDSKTQSLLIVNNATNVVIKVCEFQFCNDPFLGVYYHKNNKSWMESEFR VYSSANNCTFEYVSQPFLMDLEGKQGNFKNLREFVFKNIDGYFKIYSKHT PINLVRDLPQGFSALEPLVDLPIGINITRFQTLLALHRSYLTPGDSSSGW TA GAAAYYVGYLQPRTFLLKYNENGTITDAVDCALDPLSETKCTLGSGGGG ESQVRQQFSKDIEKLLNEQVNKEMQSSNLYMSMSSWCYTHSLDGAGLFL FDHAAEEYEHAKKLIIFLNENNVPVQLTSISAPEHKFEGLTQIFQKAYEH E QHISESINNIVDHAIKSKDHATFNFLQWYVAEQHEEEVLFKDILDKIELI GN ENHGLYLADQYVKGIAKSRKSGS | 192 |
| | pCoV126-notag | RBD-L518R-GSGGSG-NTD-SSQC-Ferrritin | 694 | NITNLCPFGEVFNATRFASVYAWNRKRISNCVADYSVLYNSASFSTFKCY GVSPTKLNDLCFTNVYADSFVIRGDEVRQIAPGQTGKIADYNYKLPDDFT GCVIAWNSNNLDSKVGGNYNYLYRLFRKSNLKPFERDISTEIYQAGSTPC NGVEGFNCYFPLQSYGFQPTNGVGYQPYRVVVLSFELRHAPATVCGPGS GGSGSSQCVNLTTRTQLPPAYTNSFTRGVYYPDKVFRSSVLHSTQDLFLP F FSNVTWFHAIHVSGTNGTKRFDNPVLPFNDGVYFASTEKSNIIRGWIFGT T LDSKTQSLLIVNNATNVVIKVCEFQFCNDPFLGVYYHKNNKSWMESEFR VYSSANNCTFEYVSQPFLMDLEGKQGNFKNLREFVFKNIDGYFKIYSKHT PINLVRDLPQGFSALEPLVDLPIGINITRFQTLLALHRSYLTPGDSSSGW TA GAAAYYVGYLQPRTFLLKYNENGTITDAVDCALDPLSETKCTLGSGGGG ESQVRQQFSKDIEKLLNEQVNKEMQSSNLYMSMSSWCYTHSLDGAGLFL FDHAAEEYEHAKKLIIFLNENNVPVQLTSISAPEHKFEGLTQIFQKAYEH E QHISESINNIVDHAIKSKDHATFNFLQWYVAEQHEEEVLFKDILDKIELI GN ENHGLYLADQYVKGIAKSRKSGS | 193 |
| | pCoV127-notag | RBD-Ferritin-F490A-518LLH to 518 NKS | 396 | NITNLCPFGEVFNATRFASVYAWNRKRISNCVADYSVLYNSASFSTFKCY GVSPTKLNDLCFTNVYADSFVIRGDEVRQIAPGQTGKIADYNYKLPDDFT GCVIAWNSNNLDSKVGGNYNYLYRLFRKSNLKPFERDISTEIYQAGSTPC NGVEGFNCYAPLQSYGFQPTNGVGYQPYRVVVLSFENKSAPATVCGPGS GGGGESQVRQQFSKDIEKLLNEQVNKEMQSSNLYMSMSSWCYTHSLDG AGLFLFDHAAEEYEHAKKLIIFLNENNVPVQLTSISAPEHKFEGLTQIFQ KA YEHEQHISESINNIVDHAIKSKDHATFNFLQWYVAEQHEEEVLFKDILDK I ELIGNENHGLYLADQYVKGIAKSRKSGS | 194 |
| | pCoV128-notag | RBD-Ferritin-F490A-L518R | 396 | NITNLCPFGEVFNATRFASVYAWNRKRISNCVADYSVLYNSASFSTFKCY GVSPTKLNDLCFTNVYADSFVIRGDEVRQIAPGQTGKIADYNYKLPDDFT GCVIAWNSNNLDSKVGGNYNYLYRLFRKSNLKPFERDISTEIYQAGSTPC NGVEGFNCYAPLQSYGFQPTNGVGYQPYRVVVLSFELRHAPATVCGPGS GGGGESQVRQQFSKDIEKLLNEQVNKEMQSSNLYMSMSSWCYTHSLDG AGLFLFDHAAEEYEHAKKLIIFLNENNVPVQLTSISAPEHKFEGLTQIFQ KA YEHEQHISESINNIVDHAIKSKDHATFNFLQWYVAEQHEEEVLFKDILDK I ELIGNENHGLYLADQYVKGIAKSRKSGS | 195 |
| | pCoV129-notag | RBD-Ferritin-L455R/Y449K /F490R-518LLH to NKS | 396 | NITNLCPFGEVFNATRFASVYAWNRKRISNCVADYSVLYNSASFSTFKCY GVSPTKLNDLCFTNVYADSFVIRGDEVRQIAPGQTGKIADYNYKLPDDFT GCVIAWNSNNLDSKVGGNKNYLYRRFRKSNLKPFERDISTEIYQAGSTPC NGVEGFNCYRPLQSYGFQPTNGVGYQPYRVVVLSFENKSAPATVCGPGS GGGGESQVRQQFSKDIEKLLNEQVNKEMQSSNLYMSMSSWCYTHSLDG AGLFLFDHAAEEYEHAKKLIIFLNENNVPVQLTSISAPEHKFEGLTQIFQ KA YEHEQHISESINNIVDHAIKSKDHATFNFLQWYVAEQHEEEVLFKDILDK I ELIGNENHGLYLADQYVKGIAKSRKSGS | 196 |
| | pCoV130-notag | RBD-Ferritin-L455R/Y449K /F490R-L518R | 396 | NITNLCPFGEVFNATRFASVYAWNRKRISNCVADYSVLYNSASFSTFKCY GVSPTKLNDLCFTNVYADSFVIRGDEVRQIAPGQTGKIADYNYKLPDDFT GCVIAWNSNNLDSKVGGNKNYLYRRFRKSNLKPFERDISTEIYQAGSTPC NGVEGFNCYRPLQSYGFQPTNGVGYQPYRVVVLSFELRHAPATVCGPGS GGGGESQVRQQFSKDIEKLLNEQVNKEMQSSNLYMSMSSWCYTHSLDG AGLFLFDHAAEEYEHAKKLIIFLNENNVPVQLTSISAPEHKFEGLTQIFQ KA YEHEQHISESINNIVDHAIKSKDHATFNFLQWYVAEQHEEEVLFKDILDK I ELIGNENHGLYLADQYVKGIAKSRKSGS | 197 |
| | pCoV131-notag | RBD-Ferritin-Y453R-518LLH to NKS | 396 | NITNLCPFGEVFNATRFASVYAWNRKRISNCVADYSVLYNSASFSTFKCY GVSPTKLNDLCFTNVYADSFVIRGDEVRQIAPGQTGKIADYNYKLPDDFT GCVIAWNSNNLDSKVGGNYNYLRRLFRKSNLKPFERDISTEIYQAGSTPC NGVEGFNCYFPLQSYGFQPTNGVGYQPYRVVVLSFENKSAPATVCGPGS GGGGESQVRQQFSKDIEKLLNEQVNKEMQSSNLYMSMSSWCYTHSLDG AGLFLFDHAAEEYEHAKKLIIFLNENNVPVQLTSISAPEHKFEGLTQIFQ KA YEHEQHISESINNIVDHAIKSKDHATFNFLQWYVAEQHEEEVLFKDILDK I ELIGNENHGLYLADQYVKGIAKSRKSGS | 198 |
| | pCoV132-notag | RBD-Ferritin-Y453R-L518R | 396 | NITNLCPFGEVFNATRFASVYAWNRKRISNCVADYSVLYNSASFSTFKCY GVSPTKLNDLCFTNVYADSFVIRGDEVRQIAPGQTGKIADYNYKLPDDFT GCVIAWNSNNLDSKVGGNYNYLRRLFRKSNLKPFERDISTEIYQAGSTPC NGVEGFNCYFPLQSYGFQPTNGVGYQPYRVVVLSFELRHAPATVCGPGS GGGGESQVRQQFSKDIEKLLNEQVNKEMQSSNLYMSMSSWCYTHSLDG AGLFLFDHAAEEYEHAKKLIIFLNENNVPVQLTSISAPEHKFEGLTQIFQ KA YEHEQHISESINNIVDHAIKSKDHATFNFLQWYVAEQHEEEVLFKDILDK I ELIGNENHGLYLADQYVKGIAKSRKSGS | 199 |
| | pCoV50-notag | RBD-Ferritin-L455R/Y449K /F490R | 396 | NITNLCPFGEVFNATRFASVYAWNRKRISNCVADYSVLYNSASFSTFKCY GVSPTKLNDLCFTNVYADSFVIRGDEVRQIAPGQTGKIADYNYKLPDDFT GCVIAWNSNNLDSKVGGNKNYLYRRFRKSNLKPFERDISTEIYQAGSTPC NGVEGFNCYRPLQSYGFQPTNGVGYQPYRVVVLSFELLHAPATVCGPGS GGGGESQVRQQFSKDIEKLLNEQVNKEMQSSNLYMSMSSWCYTHSLDG AGLFLFDHAAEEYEHAKKLIIFLNENNVPVQLTSISAPEHKFEGLTQIFQ KA YEHEQHISESINNIVDHAIKSKDHATFNFLQWYVAEQHEEEVLFKDILDK I ELIGNENHGLYLADQYVKGIAKSRKSGS | 200 |
| | pCoV51-notag | RBD-Ferritin-L455R | 396 | NITNLCPFGEVFNATRFASVYAWNRKRISNCVADYSVLYNSASFSTFKCY GVSPTKLNDLCFTNVYADSFVIRGDEVRQIAPGQTGKIADYNYKLPDDFT GCVIAWNSNNLDSKVGGNYNYLYRRFRKSNLKPFERDISTEIYQAGSTPC NGVEGFNCYFPLQSYGFQPTNGVGYQPYRVVVLSFELLHAPATVCGPGS GGGGESQVRQQFSKDIEKLLNEQVNKEMQSSNLYMSMSSWCYTHSLDG AGLFLFDHAAEEYEHAKKLIIFLNENNVPVQLTSISAPEHKFEGLTQIFQ KA YEHEQHISESINNIVDHAIKSKDHATFNFLQWYVAEQHEEEVLFKDILDK I ELIGNENHGLYLADQYVKGIAKSRKSGS | 201 |
| | pCoV52-notag | RBD-Ferritin-I468R | 396 | NITNLCPFGEVFNATRFASVYAWNRKRISNCVADYSVLYNSASFSTFKCY GVSPTKLNDLCFTNVYADSFVIRGDEVRQIAPGQTGKIADYNYKLPDDFT GCVIAWNSNNLDSKVGGNYNYLYRLFRKSNLKPFERDRSTEIYQAGSTPC NGVEGFNCYFPLQSYGFQPTNGVGYQPYRVVVLSFELLHAPATVCGPGS GGGGESQVRQQFSKDIEKLLNEQVNKEMQSSNLYMSMSSWCYTHSLDG AGLFLFDHAAEEYEHAKKLIIFLNENNVPVQLTSISAPEHKFEGLTQIFQ KA YEHEQHISESINNIVDHAIKSKDHATFNFLQWYVAEQHEEEVLFKDILDK I ELIGNENHGLYLADQYVKGIAKSRKSGS | 202 |
| | pCoV53-notag | RBD-Ferritin-Y453R | 396 | NITNLCPFGEVFNATRFASVYAWNRKRISNCVADYSVLYNSASFSTFKCY GVSPTKLNDLCFTNVYADSFVIRGDEVRQIAPGQTGKIADYNYKLPDDFT GCVIAWNSNNLDSKVGGNYNYLRRLFRKSNLKPFERDISTEIYQAGSTPC NGVEGFNCYFPLQSYGFQPTNGVGYQPYRVVVLSFELLHAPATVCGPGS GGGGESQVRQQFSKDIEKLLNEQVNKEMQSSNLYMSMSSWCYTHSLDG AGLFLFDHAAEEYEHAKKLIIFLNENNVPVQLTSISAPEHKFEGLTQIFQ KA YEHEQHISESINNIVDHAIKSKDHATFNFLQWYVAEQHEEEVLFKDILDK I ELIGNENHGLYLADQYVKGIAKSRKSGS | 203 |
| | pCoV54-notag | RBD-Ferritin-L452R | 396 | NITNLCPFGEVFNATRFASVYAWNRKRISNCVADYSVLYNSASFSTFKCY GVSPTKLNDLCFTNVYADSFVIRGDEVRQIAPGQTGKIADYNYKLPDDFT GCVIAWNSNNLDSKVGGNYNYRYRLFRKSNLKPFERDISTEIYQAGSTPC NGVEGFNCYFPLQSYGFQPTNGVGYQPYRVVVLSFELLHAPATVCGPGS GGGGESQVRQQFSKDIEKLLNEQVNKEMQSSNLYMSMSSWCYTHSLDG AGLFLFDHAAEEYEHAKKLIIFLNENNVPVQLTSISAPEHKFEGLTQIFQ KA YEHEQHISESINNIVDHAIKSKDHATFNFLQWYVAEQHEEEVLFKDILDK I ELIGNENHGLYLADQYVKGIAKSRKSGS | 204 |
| | pCoV55-notag | RBD-Ferritin-L492R | 396 | NITNLCPFGEVFNATRFASVYAWNRKRISNCVADYSVLYNSASFSTFKCY GVSPTKLNDLCFTNVYADSFVIRGDEVRQIAPGQTGKIADYNYKLPDDFT GCVIAWNSNNLDSKVGGNYNYLYRLFRKSNLKPFERDISTEIYQAGSTPC NGVEGFNCYFPRQSYGFQPTNGVGYQPYRVVVLSFELLHAPATVCGPGS GGGGESQVRQQFSKDIEKLLNEQVNKEMQSSNLYMSMSSWCYTHSLDG AGLFLFDHAAEEYEHAKKLIIFLNENNVPVQLTSISAPEHKFEGLTQIFQ KA YEHEQHISESINNIVDHAIKSKDHATFNFLQWYVAEQHEEEVLFKDILDK I ELIGNENHGLYLADQYVKGIAKSRKSGS | 205 |
| | pCoV56-notag | RBD-Ferritin-F490R | 396 | NITNLCPFGEVFNATRFASVYAWNRKRISNCVADYSVLYNSASFSTFKCY GVSPTKLNDLCFTNVYADSFVIRGDEVRQIAPGQTGKIADYNYKLPDDFT GCVIAWNSNNLDSKVGGNYNYLYRLFRKSNLKPFERDISTEIYQAGSTPC NGVEGFNCYRPLQSYGFQPTNGVGYQPYRVVVLSFELLHAPATVCGPGS GGGGESQVRQQFSKDIEKLLNEQVNKEMQSSNLYMSMSSWCYTHSLDG AGLFLFDHAAEEYEHAKKLIIFLNENNVPVQLTSISAPEHKFEGLTQIFQ KA YEHEQHISESINNIVDHAIKSKDHATFNFLQWYVAEQHEEEVLFKDILDK I ELIGNENHGLYLADQYVKGIAKSRKSGS | 206 |
| | pCoV57-notag | RBD-Ferritin-F490A | 396 | NITNLCPFGEVFNATRFASVYAWNRKRISNCVADYSVLYNSASFSTFKCY GVSPTKLNDLCFTNVYADSFVIRGDEVRQIAPGQTGKIADYNYKLPDDFT GCVIAWNSNNLDSKVGGNYNYLYRLFRKSNLKPFERDISTEIYQAGSTPC NGVEGFNCYAPLQSYGFQPTNGVGYQPYRVVVLSFELLHAPATVCGPGS GGGGESQVRQQFSKDIEKLLNEQVNKEMQSSNLYMSMSSWCYTHSLDG AGLFLFDHAAEEYEHAKKLIIFLNENNVPVQLTSISAPEHKFEGLTQIFQ KA YEHEQHISESINNIVDHAIKSKDHATFNFLQWYVAEQHEEEVLFKDILDK I ELIGNENHGLYLADQYVKGIAKSRKSGS | 207 |
| | pCoV58-notag | RBD-Ferritin-518LLH to 518 NKS | 396 | NITNLCPFGEVFNATRFASVYAWNRKRISNCVADYSVLYNSASFSTFKCY GVSPTKLNDLCFTNVYADSFVIRGDEVRQIAPGQTGKIADYNYKLPDDFT GCVIAWNSNNLDSKVGGNYNYLYRLFRKSNLKPFERDISTEIYQAGSTPC NGVEGFNCYFPLQSYGFQPTNGVGYQPYRVVVLSFENKSAPATVCGPGS GGGGESQVRQQFSKDIEKLLNEQVNKEMQSSNLYMSMSSWCYTHSLDG AGLFLFDHAAEEYEHAKKLIIFLNENNVPVQLTSISAPEHKFEGLTQIFQ KA YEHEQHISESINNIVDHAIKSKDHATFNFLQWYVAEQHEEEVLFKDILDK I ELIGNENHGLYLADQYVKGIAKSRKSGS | 208 |
| | pCoV59-notag | RBD-Ferritin-L518R | 396 | NITNLCPFGEVFNATRFASVYAWNRKRISNCVADYSVLYNSASFSTFKCY GVSPTKLNDLCFTNVYADSFVIRGDEVRQIAPGQTGKIADYNYKLPDDFT GCVIAWNSNNLDSKVGGNYNYLYRLFRKSNLKPFERDISTEIYQAGSTPC NGVEGFNCYFPLQSYGFQPTNGVGYQPYRVVVLSFELRHAPATVCGPGS GGGGESQVRQQFSKDIEKLLNEQVNKEMQSSNLYMSMSSWCYTHSLDG AGLFLFDHAAEEYEHAKKLIIFLNENNVPVQLTSISAPEHKFEGLTQIFQ KA YEHEQHISESINNIVDHAIKSKDHATFNFLQWYVAEQHEEEVLFKDILDK I ELIGNENHGLYLADQYVKGIAKSRKSGS | 209 |
| | pCoV60-notag | RBD-Ferritin-V367T/L335N | 396 | NITNNCPFGEVFNATRFASVYAWNRKRISNCVADYSTLYNSASFSTFKCY GVSPTKLNDLCFTNVYADSFVIRGDEVRQIAPGQTGKIADYNYKLPDDFT GCVIAWNSNNLDSKVGGNYNYLYRLFRKSNLKPFERDISTEIYQAGSTPC NGVEGFNCYFPLQSYGFQPTNGVGYQPYRVVVLSFELLHAPATVCGPGS GGGGESQVRQQFSKDIEKLLNEQVNKEMQSSNLYMSMSSWCYTHSLDG AGLFLFDHAAEEYEHAKKLIIFLNENNVPVQLTSISAPEHKFEGLTQIFQ KA YEHEQHISESINNIVDHAIKSKDHATFNFLQWYVAEQHEEEVLFKDILDK I ELIGNENHGLYLADQYVKGIAKSRKSGS | 210 |
| | pCoV61-notag | RBD-Ferritin-T385N/L387T | 396 | NITNLCPFGEVFNATRFASVYAWNRKRISNCVADYSVLYNSASFSTFKCY GVSPNKTNDLCFTNVYADSFVIRGDEVRQIAPGQTGKIADYNYKLPDDFT GCVIAWNSNNLDSKVGGNYNYLYRLFRKSNLKPFERDISTEIYQAGSTPC NGVEGFNCYFPLQSYGFQPTNGVGYQPYRVVVLSFELLHAPATVCGPGS GGGGESQVRQQFSKDIEKLLNEQVNKEMQSSNLYMSMSSWCYTHSLDG AGLFLFDHAAEEYEHAKKLIIFLNENNVPVQLTSISAPEHKFEGLTQIFQ KA YEHEQHISESINNIVDHAIKSKDHATFNFLQWYVAEQHEEEVLFKDILDK I ELIGNENHGLYLADQYVKGIAKSRKSGS | 211 |
| | pCoV62-notag | RBD-Ferritin-V382R | 396 | NITNLCPFGEVFNATRFASVYAWNRKRISNCVADYSVLYNSASFSTFKCY GRSPTKLNDLCFTNVYADSFVIRGDEVRQIAPGQTGKIADYNYKLPDDFT GCVIAWNSNNLDSKVGGNYNYLYRLFRKSNLKPFERDISTEIYQAGSTPC NGVEGFNCYFPLQSYGFQPTNGVGYQPYRVVVLSFELLHAPATVCGPGS GGGGESQVRQQFSKDIEKLLNEQVNKEMQSSNLYMSMSSWCYTHSLDG AGLFLFDHAAEEYEHAKKLIIFLNENNVPVQLTSISAPEHKFEGLTQIFQ KA YEHEQHISESINNIVDHAIKSKDHATFNFLQWYVAEQHEEEVLFKDILDK I ELIGNENHGLYLADQYVKGIAKSRKSGS | 212 |
| | pCoV63-notag | RBD-Ferritin-F377R | 396 | NITNLCPFGEVFNATRFASVYAWNRKRISNCVADYSVLYNSASFSTRKCY GVSPTKLNDLCFTNVYADSFVIRGDEVRQIAPGQTGKIADYNYKLPDDFT GCVIAWNSNNLDSKVGGNYNYLYRLFRKSNLKPFERDISTEIYQAGSTPC NGVEGFNCYFPLQSYGFQPTNGVGYQPYRVVVLSFELLHAPATVCGPGS GGGGESQVRQQFSKDIEKLLNEQVNKEMQSSNLYMSMSSWCYTHSLDG AGLFLFDHAAEEYEHAKKLIIFLNENNVPVQLTSISAPEHKFEGLTQIFQ KA YEHEQHISESINNIVDHAIKSKDHATFNFLQWYVAEQHEEEVLFKDILDK I ELIGNENHGLYLADQYVKGIAKSRKSGS | 213 |
| | | RBD-NTD-SD1 SARS-CoV-2 | | ITNLCPFGEVFNATRFASVYAWNRKRISNCVADYSVLYNSASFSTFKCYG VSPTKLNDLCFTNVYADSFVIRGDEVRQIAPGQTGKIADYNYKLPDDFTG CVIAWNSNNLDSKVGGNYNYLYRLFRKSNLKPFERDISTEIYQAGSTPCN GVEGFNCYFPLQSYGFQPTNGVGYQPYRVVVLSFELLHAPATVCGQPTES IVRFPNPKKSTNLVKNKCVNFNFNGLTGTGVLTESNKKFLPFQQFGRDIA DTTDAVRDPQTLEILDITPCS--AYTNSFTRGVYYPDKVFRSSVLHSTQDLFLPFFSNVTWFHDNPVLPFNDG VYFASTNIIRGWIFGTTLDSKTQSLLIVNNATNVVIKVCEFQFCNDPFFR VY SSANNCTFEYVSQPFLKNLREFVFKNIDGYFKIYSKHT PINLVRDLPQGFSALEPLVDLPIGINITRFQTLLALHGAAAYYVGYLQPR TF LLKYNENGTITDAVDCALD | 214 |
| | | RBD-NTD-SD1 MERS | | KPSGSVVEQAEGVECDFSPLLSGTPPQVYNFKRLVFTNCNYNLTKLLSLF S VNDFTCSQISPAAIASNCYSSLILDYFSYPLSMKSDLSVSSAGPISQFNY KQ SFSNPTCLILATVPHNLTTITKPLKYSYINKCSRLLSDDRTEVPQLVNAN QY SPCVSIVPSTVWEDGDYYRKQLSPLEGGGWLVASGSTVAMTEQLQMGFG ITVQYGTDTNSVCPKLEFANDTKIASQLGNCVEYSLYGVSGRGVFQNCTA VGVRQQRFVYDAYQNLVGYYSDDGNY--VDVGPDSVKSACIEVDIQQTFFDKTWPRPIDVSKADGIIYPQGRTYSNIT IT YQGLFPYQGDHGDMYVYSAGHATGTTPQKLFVANYSQDVKQFANGFVV RIGAAANSTGTVIISPSTSATIRKIYPAFMLGSSVGNFSDGKMGRFFNHT LV LLPDGCGTLLRAFYCILEPRSGNHCPAGNSYTSFATYHTPATDCSDGNYN RNASLNSFKEYFNLRNCTFMYTYNITEDEILEWFGITQTAQGVHLFSSRY V DLYGGNMFQFATLPVYDTIKYYSIIPHSIRSIQSDRKAWAAFYVYKLQPL T FLLDFSVDGYIRRAIDCGFNDLSQLHCSY | 215 |
| | | RBD-NTD-SD1 SARS-CoV | | RVVPSGDVVRFPNITNLCPFGEVFNATKFPSVYAWERKKISNCVADYSVL YNSTFFSTFKCYGVSATKLNDLCFSNVYADSFVVKGDDVRQIAPGQTGVI ADYNYKLPDDFMGCVLAWNTRNIDATSTGNYNYKYRYLRHGKLRPFER DISNVPFSPDGKPCTPPALNCYWPLNDYGFYTTTGIGYQPYRVVVLSFEL L NAPATVCGPKLSTDLIKNQCVNFNFNGLTGTGVLTPSSKRFQPFQQFGRD VSDFTDSVRDPKTSEILDISPCS--RCTTFDDVQAPNYTQHTSSMRGVYYPDEIFRSDTLYLTQDLFLPFYSNVT GFHTINHTFDNPVIPFKDGIYFAATEKSNVVRGWVFGSTMNNKSQSVIII N NSTNVVIRACNFELCDNPFFAVSKPMGTQTHTMIFDNAFNCTFEYISDAF S LDVSEKSGNFKHLREFVFKNKDGFLYVYKGYQPIDVVRDLPSGFNTLKPI FKLPLGINITNFRAILTAFSTWGTSAAAYFVGYLKPTTFMLKYDENGTIT D AVDCSQ | 216 |
| | | pCoV131-B.1.1.7/501Y.V1-N501Y | | HHHHHHHHGPLEVLFQGPNITNLCPFGEVFNATRFASVYAWNRKRISNCV ADYSVLYNSASFSTFKCYGVSPTKLNDLCFTNVYADSFVIRGDEVRQIAP GQTGKIADYNYKLPDDFTGCVIAWNSNNLDSKVGGNYNYLRRLFRKSNL KPFERDISTEIYQAGSTPCNGVEGFNCYFPLQSYGFQPTYGVGYQPYRVV VLSFENKSAPATVCGPGSGGGGESQVRQQFSKDIEKLLNEQVNKEMQSSN LYMSMSSWCYTHSLDGAGLFLFDHAAEEYEHAKKLIIFLNENNVPVQLTS ISAPEHKFEGLTQIFQKAYEHEQHISESINNIVDHAIKSKDHATFNFLQW YV AEQHEEEVLFKDILDKIELIGNENHGLYLADQYVKGIAKSRKSGS | 217 |
| | | pCoV131-B.1.351/501Y. V2-K417N_E484 K_N501Y | | HHHHHHHHGPLEVLFQGPNITNLCPFGEVFNATRFASVYAWNRKRISNCV ADYSVLYNSASFSTFKCYGVSPTKLNDLCFTNVYADSFVIRGDEVRQIAP GQTGNIADYNYKLPDDFTGCVIAWNSNNLDSKVGGNYNYLRRLFRKSNL KPFERDISTEIYQAGSTPCNGVKGFNCYFPLQSYGFQPTYGVGYQPYRVV VLSFENKSAPATVCGPGSGGGGESQVRQQFSKDIEKLLNEQVNKEMQSSN LYMSMSSWCYTHSLDGAGLFLFDHAAEEYEHAKKLIIFLNENNVPVQLTS ISAPEHKFEGLTQIFQKAYEHEQHISESINNIVDHAIKSKDHATFNFLQW YV AEQHEEEVLFKDILDKIELIGNENHGLYLADQYVKGIAKSRKSGS | 218 |
| | | pCoV131-P.1/501Y.V3-K417T_E484K_N501Y | | HHHHHHHHGPLEVLFQGPNITNLCPFGEVFNATRFASVYAWNRKRISNCV ADYSVLYNSASFSTFKCYGVSPTKLNDLCFTNVYADSFVIRGDEVRQIAP GQTGTIADYNYKLPDDFTGCVIAWNSNNLDSKVGGNYNYLRRLFRKSNL KPFERDISTEIYQAGSTPCNGVKGFNCYFPLQSYGFQPTYGVGYQPYRVV VLSFENKSAPATVCGPGSGGGGESQVRQQFSKDIEKLLNEQVNKEMQSSN LYMSMSSWCYTHSLDGAGLFLFDHAAEEYEHAKKLIIFLNENNVPVQLTS ISAPEHKFEGLTQIFQKAYEHEQHISESINNIVDHAIKSKDHATFNFLQW YV AEQHEEEVLFKDILDKIELIGNENHGLYLADQYVKGIAKSRKSGS | 219 |
| | | pCoV111-B.1.1.7/501Y.V1-delta69-70_delta144_N501Y_A570D_D614G | | SSQCVNLTTRTQLPPAYTNSFTRGVYYPDKVFRSSVLHSTQDLFLPFFSN V TWFHAISGTNGTKRFDNPVLPFNDGVYFASTEKSNIIRGWIFGTTLDSKT Q SLLIVNNATNVVIKVCEFQFCNDPFLGVYHKNNKSWMESEFRVYSSANN CTFEYVSQPFLMDLEGKQGNFKNLREFVFKNIDGYFKIYSKHTPINLVRD L PQGFSALEPLVDLPIGINITRFQTLLALHRSYLTPGDSSSGWTAGAAAYY V GYLQPRTFLLKYNENGTITDAVDCALDPLSETKCTLKSFTVEKGIYQTSN F RVQPTESIVRFPNITNLCPFGEVFNATRFASVYAWNRKRISNCVADYSVL Y NSASFSTFKCYGVSPTKLNDLCFTNVYADSFVIRGDEVRQIAPGQTGKIA D YNYKLPDDFTGCVIAWNSNNLDSKVGGNYNYLYRLFRKSNLKPFERDIST EIYQAGSTPCNGVEGFNCYFPLQSYGFQPTYGVGYQPYRVVVLSFELLHA PATVCGPKKSTNLVKNKCVNFNFNGLTGTGVLTESNKKFLPFQQFGRDID DTTDAVRDPQTLEILDITPCSFGGVSVITPGTNTSNQVAVLYQGVNCTEV P VAIHADQLTPTWRVYSTGSNVFQTRAGCLIGAEHVNNSYECDIPIGAGIC A SYQTGGSQSIIAYTGSGGGGESQVRQQFSKDIEKLLNEQVNKEMQSSNLY MSMSSWCYTHSLDGAGLFLFDHAAEEYEHAKKLIIFLNENNVPVQLTSIS APEHKFEGLTQIFQKAYEHEQHISESINNIVDHAIKSKDHATFNFLQWYV A EQHEEEVLFKDILDKIELIGNENHGLYLADQYVKGIAKSRKSGS | 220 |
| | | pCoV111-B.1.351/501Y.V2-L18F_D80A_ D215G _delta241-243_R246I_K 417N_E484K_ N501Y_D614G | | SSQCVNFTTRTQLPPAYTNSFTRGVYYPDKVFRSSVLHSTQDLFLPFFSN V TWFHAIHVSGTNGTKRFANPVLPFNDGVYFASTEKSNIIRGWIFGTTLDS K TQSLLIVNNATNVVIKVCEFQFCNDPFLGVYYHKNNKSWMESEFRVYSSA NNCTFEYVSQPFLMDLEGKQGNFKNLREFVFKNIDGYFKIYSKHTPINLV R GLPQGFSALEPLVDLPIGINITRFQTLHISYLTPGDSSSGWTAGAAAYYV G YLQPRTFLLKYNENGTITDAVDCALDPLSETKCTLKSFTVEKGIYQTSNF R VQPTESIVRFPNITNLCPFGEVFNATRFASVYAWNRKRISNCVADYSVLY N SASFSTFKCYGVSPTKLNDLCFTNVYADSFVIRGDEVRQIAPGQTGNIAD Y NYKLPDDFTGCVIAWNSNNLDSKVGGNYNYLYRLFRKSNLKPFERDISTE IYQAGSTPCNGVKGFNCYFPLQSYGFQPTYGVGYQPYRVVVLSFELLHAP ATVCGPKKSTNLVKNKCVNFNFNGLTGTGVLTESNKKFLPFQQFGRDIAD TTDAVRDPQTLEILDITPCSFGGVSVITPGTNTSNQVAVLYQGVNCTEVP V AIHADQLTPTWRVYSTGSNVFQTRAGCLIGAEHVNNSYECDIPIGAGICA S YQTGGSQSIIAYTGSGGGGESQVRQQFSKDIEKLLNEQVNKEMQSSNLYM SMSSWCYTHSLDGAGLFLFDHAAEEYEHAKKLIIFLNENNVPVQLTSISA P EHKFEGLTQIFQKAYEHEQHISESINNIVDHAIKSKDHATFNFLQWYVAE Q HEEEVLFKDILDKIELIGNENHGLYLADQYVKGIAKSRKSGS | 221 |
| | | pCoV111-B.1.351/501Y. V2-L18F_D80_D215G _delta241-243_R246I_K417N_E484K_N501Y_D614G | | SSQCVNFTTRTQLPPAYTNSFTRGVYYPDKVFRSSVLHSTQDLFLPFFSN V TWFHAIHVSGTNGTKRFDNPVLPFNDGVYFASTEKSNIIRGWIFGTTLDS K TQSLLIVNNATNVVIKVCEFQFCNDPFLGVYYHKNNKSWMESEFRVYSSA NNCTFEYVSQPFLMDLEGKQGNFKNLREFVFKNIDGYFKIYSKHTPINLV R GLPQGFSALEPLVDLPIGINITRFQTLHISYLTPGDSSSGWTAGAAAYYV G YLQPRTFLLKYNENGTITDAVDCALDPLSETKCTLKSFTVEKGIYQTSNF R VQPTESIVRFPNITNLCPFGEVFNATRFASVYAWNRKRISNCVADYSVLY N SASFSTFKCYGVSPTKLNDLCFTNVYADSFVIRGDEVRQIAPGQTGNIAD Y NYKLPDDFTGCVIAWNSNNLDSKVGGNYNYLYRLFRKSNLKPFERDISTE IYQAGSTPCNGVKGFNCYFPLQSYGFQPTYGVGYQPYRVVVLSFELLHAP ATVCGPKKSTNLVKNKCVNFNFNGLTGTGVLTESNKKFLPFQQFGRDIAD TTDAVRDPQTLEILDITPCSFGGVSVITPGTNTSNQVAVLYQGVNCTEVP V AIHADQLTPTWRVYSTGSNVFQTRAGCLIGAEHVNNSYECDIPIGAGICA S YQTGGSQSIIAYTGSGGGGESQVRQQFSKDIEKLLNEQVNKEMQSSNLYM SMSSWCYTHSLDGAGLFLFDHAAEEYEHAKKLIIFLNENNVPVQLTSISA P EHKFEGLTQIFQKAYEHEQHISESINNIVDHAIKSKDHATFNFLQWYVAE Q HEEEVLFKDILDKIELIGNENHGLYLADQYVKGIAKSRKSGS | 222 |
| | | pCoV111-B.1.351/501Y.V2-L18F_D80A _D215_delta241243_R246I_K417N_E484K_N501Y_D614G | | SSQCVNFTTRTQLPPAYTNSFTRGVYYPDKVFRSSVLHSTQDLFLPFFSN V TWFHAIHVSGTNGTKRFANPVLPFNDGVYFASTEKSNIIRGWIFGTTLDS K TQSLLIVNNATNVVIKVCEFQFCNDPFLGVYYHKNNKSWMESEFRVYSSA NNCTFEYVSQPFLMDLEGKQGNFKNLREFVFKNIDGYFKIYSKHTPINLV R DLPQGFSALEPLVDLPIGINITRFQTLHISYLTPGDSSSGWTAGAAAYYV G YLQPRTFLLKYNENGTITDAVDCALDPLSETKCTLKSFTVEKGIYQTSNF R VQPTESIVRFPNITNLCPFGEVFNATRFASVYAWNRKRISNCVADYSVLY N SASFSTFKCYGVSPTKLNDLCFTNVYADSFVIRGDEVRQIAPGQTGNIAD Y NYKLPDDFTGCVIAWNSNNLDSKVGGNYNYLYRLFRKSNLKPFERDISTE IYQAGSTPCNGVKGFNCYFPLQSYGFQPTYGVGYQPYRVVVLSFELLHAP ATVCGPKKSTNLVKNKCVNFNFNGLTGTGVLTESNKKFLPFQQFGRDIAD TTDAVRDPQTLEILDITPCSFGGVSVITPGTNTSNQVAVLYQGVNCTEVP V AIHADQLTPTWRVYSTGSNVFQTRAGCLIGAEHVNNSYECDIPIGAGICA S YQTGGSQSIIAYTGSGGGGESQVRQQFSKDIEKLLNEQVNKEMQSSNLYM SMSSWCYTHSLDGAGLFLFDHAAEEYEHAKKLIIFLNENNVPVQLTSISA P EHKFEGLTQIFQKAYEHEQHISESINNIVDHAIKSKDHATFNFLQWYVAE Q HEEEVLFKDILDKIELIGNENHGLYLADQYVKGIAKSRKSGS | 223 |
| | | pCoV111-P.1/501Y.V3-L18F_T20N_P26S_D138Y_R190S_K417T_E484K_N501Y_D614G_H655Y | | SSQCVNFTNRTQLPSAYTNSFTRGVYYPDKVFRSSVLHSTQDLFLPFFSN V TWFHAIHVSGTNGTKRFDNPVLPFNDGVYFASTEKSNIIRGWIFGTTLDS K TQSLLIVNNATNVVIKVCEFQFCNYPFLGVYYHKNNKSWMESEFRVYSSA NNCTFEYVSQPFLMDLEGKQGNFKNLSEFVFKNIDGYFKIYSKHTPINLV R DLPQGFSALEPLVDLPIGINITRFQTLLALHRSYLTPGDSSSGWTAGAAA Y YVGYLQPRTFLLKYNENGTITDAVDCALDPLSETKCTLKSFTVEKGIYQT S NFRVQPTESIVRFPNITNLCPFGEVFNATRFASVYAWNRKRISNCVADYS V LYNSASFSTFKCYGVSPTKLNDLCFTNVYADSFVIRGDEVRQIAPGQTGT I ADYNYKLPDDFTGCVIAWNSNNLDSKVGGNYNYLYRLFRKSNLKPFERD ISTEIYQAGSTPCNGVKGFNCYFPLQSYGFQPTYGVGYQPYRVVVLSFEL L HAPATVCGPKKSTNLVKNKCVNFNFNGLTGTGVLTESNKKFLPFQQFGR DIADTTDAVRDPQTLEILDITPCSFGGVSVITPGTNTSNQVAVLYQGVNC T EVPVAIHADQLTPTWRVYSTGSNVFQTRAGCLIGAEYVNNSYECDIPIGA GICASYQTGGSQSIIAYTGSGGGGESQVRQQFSKDIEKLLNEQVNKEMQS S NLYMSMSSWCYTHSLDGAGLFLFDHAAEEYEHAKKLIIFLNENNVPVQL TSISAPEHKFEGLTQIFQKAYEHEQHISESINNIVDHAIKSKDHATFNFL QW YVAEQHEEEVLFKDILDKIELIGNENHGLYLADQYVKGIAKSRKSGS | 224 |
| | | pCoV146-B.1.1.7/501Y.V1-delta69-70_delta144_N501Y | | HHHHHHHHGPLEVLFQGPNITNLCPFGEVFNATRFASVYAWNRKRISNCV ADYSVLYNSASFSTFKCYGVSPTKLNDLCFTNVYADSFVIRGDEVRQIAP GQTGKIADYNYKLPDDFTGCVIAWNSNNLDSKVGGNYNYLRRLFRKSNL KPFERDISTEIYQAGSTPCNGVEGFNCYFPLQSYGFQPTYGVGYQPYRVV VLSFENKSAPATVCGPGSGGSGSSQCVNLTTRTQLPPAYTNSFTRGVYYP DKVFRSSVLHSTQDLFLPFFSNVTWFHAISGTNGTKRFDNPVLPFNDGVY F ASTEKSNIIRGWIFGTTLDSKTQSLLIVNNATNVVIKVCEFQFCNDPFLG VY HKNNKSWMESEFRVYSSANNCTFEYVSQPFLMDLEGKQGNFKNLREFVF KNIDGYFKIYSKHTPINL VRDLPQGFSALEPL VDLPIGINITRFQTLLALHRS YLTPGDSSSGWTAGAAAYYVGYLQPRTFLLKYNENGTITDAVDCALDPL SETKCTLGSGGGGESQVRQQFSKDIEKLLNEQVNKEMQSSNLYMSMSSW CYTHSLDGAGLFLFDHAAEEYEHAKKLIIFLNENNVPVQLTSISAPEHKF E GLTQIFQKAYEHEQHISESINNIVDHAIKSKDHATFNFLQWYVAEQHEEE V LFKDILDKIELIGNENHGLYLADQYVKGIAKSRKSGS | 225 |
| | | pCoV146-B.1.351/501Y.V2-L18F_D80A_D215G_delta241-243_R246I_K417N_E484K_N501Y | | HHHHHHHHGPLEVLFQGPNITNLCPFGEVFNATRFASVYAWNRKRISNCV ADYSVLYNSASFSTFKCYGVSPTKLNDLCFTNVYADSFVIRGDEVRQIAP GQTGNIADYNYKLPDDFTGCVIAWNSNNLDSKVGGNYNYLRRLFRKSNL KPFERDISTEIYQAGSTPCNGVKGFNCYFPLQSYGFQPTYGVGYQPYRVV VLSFENKSAPATVCGPGSGGSGSSQCVNFTTRTQLPPAYTNSFTRGVYYP DKVFRSSVLHSTQDLFLPFFSNVTWFHAIHVSGTNGTKRFANPVLPFNDG VYFASTEKSNIIRGWIFGTTLDSKTQSLLIVNNATNVVIKVCEFQFCNDP FL GVYYHKNNKSWMESEFRVYSSANNCTFEYVSQPFLMDLEGKQGNFKNL REFVFKNIDGYFKIYSKHTPINLVRGLPQGFSALEPLVDLPIGINITRFQ TLH ISYLTPGDSSSGWTAGAAAYYVGYLQPRTFLLKYNENGTITDAVDCALDP LSETKCTLGSGGGGESQVRQQFSKDIEKLLNEQVNKEMQSSNLYMSMSS WCYTHSLDGAGLFLFDHAAEEYEHAKKLIIFLNENNVPVQLTSISAPEHK F EGLTQIFQKAYEHEQHISESINNIVDHAIKSKDHATFNFLQWYVAEQHEE E VLFKDILDKIELIGNENHGLYLADQYVKGIAKSRKSGS | 226 |
| | | pCoV146-B.1.351/501Y.V2-L18F_D80_D215G_delta241-243_R246I_K417N_E484K_N501Y | | HHHHHHHHGPLEVLFQGPNITNLCPFGEVFNATRFASVYAWNRKRISNCV ADYSVLYNSASFSTFKCYGVSPTKLNDLCFTNVYADSFVIRGDEVRQIAP GQTGNIADYNYKLPDDFTGCVIAWNSNNLDSKVGGNYNYLRRLFRKSNL KPFERDISTEIYQAGSTPCNGVKGFNCYFPLQSYGFQPTYGVGYQPYRVV VLSFENKSAPATVCGPGSGGSGSSQCVNFTTRTQLPPAYTNSFTRGVYYP DKVFRSSVLHSTQDLFLPFFSNVTWFHAIHVSGTNGTKRFDNPVLPFNDG VYFASTEKSNIIRGWIFGTTLDSKTQSLLIVNNATNVVIKVCEFQFCNDP FL GVYYHKNNKSWMESEFRVYSSANNCTFEYVSQPFLMDLEGKQGNFKNL REFVFKNIDGYFKIYSKHTPINLVRGLPQGFSALEPLVDLPIGINITRFQ TLH ISYLTPGDSSSGWTAGAAAYYVGYLQPRTFLLKYNENGTITDAVDCALDP LSETKCTLGSGGGGESQVRQQFSKDIEKLLNEQVNKEMQSSNLYMSMSS WCYTHSLDGAGLFLFDHAAEEYEHAKKLIIFLNENNVPVQLTSISAPEHK F EGLTQIFQKAYEHEQHISESINNIVDHAIKSKDHATFNFLQWYVAEQHEE E VLFKDILDKIELIGNENHGLYLADQYVKGIAKSRKSGS | 227 |
| | | pCoV146-B.1.351/501Y.V2-L18F_D80A_D215_delta241243_R246I_K417N_E484K_N501Y | | HHHHHHHHGPLEVLFQGPNITNLCPFGEVFNATRFASVYAWNRKRISNCV ADYSVLYNSASFSTFKCYGVSPTKLNDLCFTNVYADSFVIRGDEVRQIAP GQTGNIADYNYKLPDDFTGCVIAWNSNNLDSKVGGNYNYLRRLFRKSNL KPFERDISTEIYQAGSTPCNGVKGFNCYFPLQSYGFQPTYGVGYQPYRVV VLSFENKSAPATVCGPGSGGSGSSQCVNFTTRTQLPPAYTNSFTRGVYYP DKVFRSSVLHSTQDLFLPFFSNVTWFHAIHVSGTNGTKRFANPVLPFNDG VYFASTEKSNIIRGWIFGTTLDSKTQSLLIVNNATNVVIKVCEFQFCNDP FL GVYYHKNNKSWMESEFRVYSSANNCTFEYVSQPFLMDLEGKQGNFKNL REFVFKNIDGYFKIYSKHTPINLVRDLPQGFSALEPLVDLPIGINITRFQ TLH ISYLTPGDSSSGWTAGAAAYYVGYLQPRTFLLKYNENGTITDAVDCALDP LSETKCTLGSGGGGESQVRQQFSKDIEKLLNEQVNKEMQSSNLYMSMSS WCYTHSLDGAGLFLFDHAAEEYEHAKKLIIFLNENNVPVQLTSISAPEHK F EGLTQIFQKAYEHEQHISESINNIVDHAIKSKDHATFNFLQWYVAEQHEE E VLFKDILDKIELIGNENHGLYLADQYVKGIAKSRKSGS | 228 |
| | | pCoV146-P.1/501Y.V3-L18F_T20N_P26S_D138Y_R190S_K417T_E484K_N501Y | | HHHHHHHHGPLEVLFQGPNITNLCPFGEVFNATRFASVYAWNRKRISNCV ADYSVLYNSASFSTFKCYGVSPTKLNDLCFTNVYADSFVIRGDEVRQIAP GQTGTIADYNYKLPDDFTGCVIAWNSNNLDSKVGGNYNYLRRLFRKSNL KPFERDISTEIYQAGSTPCNGVKGFNCYFPLQSYGFQPTYGVGYQPYRVV VLSFENKSAPATVCGPGSGGSGSSQCVNFTNRTQLPSAYTNSFTRGVYYP DKVFRSSVLHSTQDLFLPFFSNVTWFHAIHVSGTNGTKRFDNPVLPFNDG VYFASTEKSNIIRGWIFGTTLDSKTQSLLIVNNATNVVIKVCEFQFCNYP FL GVYYHKNNKSWMESEFRVYSSANNCTFEYVSQPFLMDLEGKQGNFKNL SEFVFKNIDGYFKIYSKHTPINL VRDLPQGFSALEPL VDLPIGINITRFQTLL ALHRSYLTPGDSSSGWTAGAAAYYVGYLQPRTFLLKYNENGTITDAVDC ALDPLSETKCTLGSGGGGESQVRQQFSKDIEKLLNEQVNKEMQSSNLYMS MSSWCYTHSLDGAGLFLFDHAAEEYEHAKKLIIFLNENNVPVQLTSISAP E HKFEGLTQIFQKAYEHEQHISESINNIVDHAIKSKDHATFNFLQWYVAEQ H EEEVLFKDILDKIELIGNENHGLYLADQYVKGIAKSRKSGS | 229 |
| | | pCoV1B-06-PL-B.1.1.7/501Y.V1-delta69-70_delta144-N501Y-A570D-D614G-P681H-T716I-S982A-D1118H | | SSQCVNLTTRTQLPPAYTNSFTRGVYYPDKVFRSSVLHSTQDLFLPFFSN V TWFHAISGTNGTKRFDNPVLPFNDGVYFASTEKSNIIRGWIFGTTLDSKT Q SLLIVNNATNVVIKVCEFQFCNDPFLGVYHKNNKSWMESEFRVYSSANN CTFEYVSQPFLMDLEGKQGNFKNLREFVFKNIDGYFKIYSKHTPINLVRD L PQGFSALEPLVDLPIGINITRFQTLLALHRSYLTPGDSSSGWTAGAAAYY V GYLQPRTFLLKYNENGTITDAVDCALDPLSETKCTLKSFTVEKGIYQTSN F RVQPTESIVRFPNITNLCPFGEVFNATRFASVYAWNRKRISNCVADYSVL Y NSASFSTFKCYGVSPTKLNDLCFTNVYADSFVIRGDEVRQIAPGQTGKIA D YNYKLPDDFTGCVIAWNSNNLDSKVGGNYNYLYRLFRKSNLKPFERDIST EIYQAGSTPCNGVEGFNCYFPLQSYGFQPTYGVGYQPYRVVVLSFELLHA PATVCGPKKSTNLVKNKCVNFNFNGLTGTGVLTESNKKFLPFQQFGRDID DTTDAVRDPQTLEILDITPCSFGGVSVITPGTNTSNQVAVLYQGVNCTEV P VAIHADQLTPTWRVYSTGSNVFQTRAGCLIGAEHVNNSYECDIPIGAGIC A SYQTQTNSHGSASSVASQSIIAYTMSLGAENSVAYSNNSIAIPINFTISV TTE ILPVSMTKTSVDCTMYICGDSTECSNLLLQYGSFCTQLNRALTGIAVEQD K NTQEVFAQVKQIYKTPPIKDFGGFNFSQILPDPSKPSKRSFIEDLLFNKV TL ADAGFIKQYGDCLGDIAARDLICAQKFNGLTVLPPLLTDEMIAQYTSALL AGTITSGWTFGAGAALQIPFAMQMAYRFNGIGVTQNVLYENQKLIANQF NSAIGKIQDSLSSTASALGKLQDVVNQNAQALNTLVKQLSSNFGAISSVL N DILARLDPPEAEVQIDRLITGRLQSLQTYVTQQLIRAAEIRASANLAATK M SECVLGQSKRVDFCGKGYHLMSFPQSAPHGVVFLHVTYVPAQEKNFTTA PAICHDGKAHFPREGVFVSNGTHWFVTQRNFYEPQIITTHNTFVSGNCDV VIGIVNNTVYDPLQSELDSIKEELDKIHKNGSGGSGDIIKLLNEQVNKEM Q SSNLYMSMSSWCYTHSLDGAGLFLFDHAAEEYEHAKKLIIFLNENNVPVQ LTSISAPEHKFEGLTQIFQKAYEHEQHISESINNIVDHAIKSKDHATFNF LQ WYVAEQHEEEVLFKDILDKIELIGNENHGLYLADQYVKGIAKSRKSGS | 230 |
| | | pCoV1B-06-PL-B.1.351/501Y.V2-L18F_D80A_D215G_delta241-243_R246I_K417N_E484K_N501Y_D614G_A701V | | SSQCVNFTTRTQLPPAYTNSFTRGVYYPDKVFRSSVLHSTQDLFLPFFSN V TWFHAIHVSGTNGTKRFANPVLPFNDGVYFASTEKSNIIRGWIFGTTLDS K TQSLLIVNNATNVVIKVCEFQFCNDPFLGVYYHKNNKSWMESEFRVYSSA NNCTFEYVSQPFLMDLEGKQGNFKNLREFVFKNIDGYFKIYSKHTPINLV R GLPQGFSALEPLVDLPIGINITRFQTLHISYLTPGDSSSGWTAGAAAYYV G YLQPRTFLLKYNENGTITDAVDCALDPLSETKCTLKSFTVEKGIYQTSNF R VQPTESIVRFPNITNLCPFGEVFNATRFASVYAWNRKRISNCVADYSVLY N SASFSTFKCYGVSPTKLNDLCFTNVYADSFVIRGDEVRQIAPGQTGNIAD Y NYKLPDDFTGCVIAWNSNNLDSKVGGNYNYLYRLFRKSNLKPFERDISTE IYQAGSTPCNGVKGFNCYFPLQSYGFQPTYGVGYQPYRVVVLSFELLHAP ATVCGPKKSTNLVKNKCVNFNFNGLTGTGVLTESNKKFLPFQQFGRDIAD TTDAVRDPQTLEILDITPCSFGGVSVITPGTNTSNQVAVLYQGVNCTEVP V AIHADQLTPTWRVYSTGSNVFQTRAGCLIGAEHVNNSYECDIPIGAGICA S YQTQTNSPGSASSVASQSIIAYTMSLGVENSVAYSNNSIAIPTNFTISVT TEI LPVSMTKTSVDCTMYICGDSTECSNLLLQYGSFCTQLNRALTGIAVEQDK NTQEVFAQVKQIYKTPPIKDFGGFNFSQILPDPSKPSKRSFIEDLLFNKV TL ADAGFIKQYGDCLGDIAARDLICAQKFNGLTVLPPLLTDEMIAQYTSALL AGTITSGWTFGAGAALQIPFAMQMAYRFNGIGVTQNVLYENQKLIANQF NSAIGKIQDSLSSTASALGKLQDVVNQNAQALNTLVKQLSSNFGAISSVL N DILSRLDPPEAEVQIDRLITGRLQSLQTYVTQQLIRAAEIRASANLAATK MS ECVLGQSKRVDFCGKGYHLMSFPQSAPHGVVFLHVTYVPAQEKNFTTAP AICHDGKAHFPREGVFVSNGTHWFVTQRNFYEPQIITTDNTFVSGNCDVV I GIVNNTVYDPLQSELDSIKEELDKIHKNGSGGSGDIIKLLNEQVNKEMQS S NLYMSMSSWCYTHSLDGAGLFLFDHAAEEYEHAKKLIIFLNENNVPVQL TSISAPEHKFEGLTQIFQKAYEHEQHISESINNIVDHAIKSKDHATFNFL QW YVAEQHEEEVLFKDILDKIELIGNENHGLYLADQYVKGIAKSRKSGS | 231 |
| | | pCoV1B-06-PL-B.1.351/501Y.V2-L18F_D80_D215G_delta241-243_R246I_K417N_E484K_N501Y_D614G_A701V | | SSQCVNFTTRTQLPPAYTNSFTRGVYYPDKVFRSSVLHSTQDLFLPFFSN V TWFHAIHVSGTNGTKRFDNPVLPFNDGVYFASTEKSNIIRGWIFGTTLDS K TQSLLIVNNATNVVIKVCEFQFCNDPFLGVYYHKNNKSWMESEFRVYSSA NNCTFEYVSQPFLMDLEGKQGNFKNLREFVFKNIDGYFKIYSKHTPINLV R GLPQGFSALEPLVDLPIGINITRFQTLHISYLTPGDSSSGWTAGAAAYYV G YLQPRTFLLKYNENGTITDAVDCALDPLSETKCTLKSFTVEKGIYQTSNF R VQPTESIVRFPNITNLCPFGEVFNATRFASVYAWNRKRISNCVADYSVLY N SASFSTFKCYGVSPTKLNDLCFTNVYADSFVIRGDEVRQIAPGQTGNIAD Y NYKLPDDFTGCVIAWNSNNLDSKVGGNYNYLYRLFRKSNLKPFERDISTE IYQAGSTPCNGVKGFNCYFPLQSYGFQPTYGVGYQPYRVVVLSFELLHAP ATVCGPKKSTNLVKNKCVNFNFNGLTGTGVLTESNKKFLPFQQFGRDIAD TTDAVRDPQTLEILDITPCSFGGVSVITPGTNTSNQVAVLYQGVNCTEVP V AIHADQLTPTWRVYSTGSNVFQTRAGCLIGAEHVNNSYECDIPIGAGICA S YQTQTNSPGSASSVASQSIIAYTMSLGVENSVAYSNNSIAIPTNFTISVT TEI LPVSMTKTSVDCTMYICGDSTECSNLLLQYGSFCTQLNRALTGIAVEQDK NTQEVFAQVKQIYKTPPIKDFGGFNFSQILPDPSKPSKRSFIEDLLFNKV TL ADAGFIKQYGDCLGDIAARDLICAQKFNGLTVLPPLLTDEMIAQYTSALL AGTITSGWTFGAGAALQIPFAMQMAYRFNGIGVTQNVLYENQKLIANQF NSAIGKIQDSLSSTASALGKLQDVVNQNAQALNTLVKQLSSNFGAISSVL N DILSRLDPPEAEVQIDRLITGRLQSLQTYVTQQLIRAAEIRASANLAATK MS ECVLGQSKRVDFCGKGYHLMSFPQSAPHGVVFLHVTYVPAQEKNFTTAP AICHDGKAHFPREGVFVSNGTHWFVTQRNFYEPQIITTDNTFVSGNCDVV I GIVNNTVYDPLQSELDSIKEELDKIHKNGSGGSGDIIKLLNEQVNKEMQS S NLYMSMSSWCYTHSLDGAGLFLFDHAAEEYEHAKKLIIFLNENNVPVQL TSISAPEHKFEGLTQIFQKAYEHEQHISESINNIVDHAIKSKDHATFNFL QW YVAEQHEEEVLFKDILDKIELIGNENHGLYLADQYVKGIAKSRKSGS | 232 |
| | | pCoV1B-06-PL-B.1.351/501Y.V2-L18F_D80A_D215_delta241243_R246I_K417N_E484K_N501Y_D614G_A701V | | SSQCVNFTTRTQLPPAYTNSFTRGVYYPDKVFRSSVLHSTQDLFLPFFSN V TWFHAIHVSGTNGTKRFANPVLPFNDGVYFASTEKSNIIRGWIFGTTLDS K TQSLLIVNNATNVVIKVCEFQFCNDPFLGVYYHKNNKSWMESEFRVYSSA NNCTFEYVSQPFLMDLEGKQGNFKNLREFVFKNIDGYFKIYSKHTPINLV R DLPQGFSALEPLVDLPIGINITRFQTLHISYLTPGDSSSGWTAGAAAYYV G YLQPRTFLLKYNENGTITDAVDCALDPLSETKCTLKSFTVEKGIYQTSNF R VQPTESIVRFPNITNLCPFGEVFNATRFASVYAWNRKRISNCVADYSVLY N SASFSTFKCYGVSPTKLNDLCFTNVYADSFVIRGDEVRQIAPGQTGNIAD Y NYKLPDDFTGCVIAWNSNNLDSKVGGNYNYLYRLFRKSNLKPFERDISTE IYQAGSTPCNGVKGFNCYFPLQSYGFQPTYGVGYQPYRVVVLSFELLHAP ATVCGPKKSTNLVKNKCVNFNFNGLTGTGVLTESNKKFLPFQQFGRDIAD TTDAVRDPQTLEILDITPCSFGGVSVITPGTNTSNQVAVLYQGVNCTEVP V AIHADQLTPTWRVYSTGSNVFQTRAGCLIGAEHVNNSYECDIPIGAGICA S YQTQTNSPGSASSVASQSIIAYTMSLGVENSVAYSNNSIAIPTNFTISVT TEI LPVSMTKTSVDCTMYICGDSTECSNLLLQYGSFCTQLNRALTGIAVEQDK NTQEVFAQVKQIYKTPPIKDFGGFNFSQILPDPSKPSKRSFIEDLLFNKV TL ADAGFIKQYGDCLGDIAARDLICAQKFNGLTVLPPLLTDEMIAQYTSALL AGTITSGWTFGAGAALQIPFAMQMAYRFNGIGVTQNVLYENQKLIANQF NSAIGKIQDSLSSTASALGKLQDVVNQNAQALNTLVKQLSSNFGAISSVL N DILSRLDPPEAEVQIDRLITGRLQSLQTYVTQQLIRAAEIRASANLAATK MS ECVLGQSKRVDFCGKGYHLMSFPQSAPHGVVFLHVTYVPAQEKNFTTAP AICHDGKAHFPREGVFVSNGTHWFVTQRNFYEPQIITTDNTFVSGNCDVV I GIVNNTVYDPLQSELDSIKEELDKIHKNGSGGSGDIIKLLNEQVNKEMQS S NLYMSMSSWCYTHSLDGAGLFLFDHAAEEYEHAKKLIIFLNENNVPVQL TSISAPEHKFEGLTQIFQKAYEHEQHISESINNIVDHAIKSKDHATFNFL QW YVAEQHEEEVLFKDILDKIELIGNENHGLYLADQYVKGIAKSRKSGS | 233 |
| | | pCoV1B-06-PL-B.1.351/501Y.V2-L18F_D80A_D215G_delta241-243_R246_K417N_E484K_N501Y_D614G_A701V | | SSQCVNFTTRTQLPPAYTNSFTRGVYYPDKVFRSSVLHSTQDLFLPFFSN V TWFHAIHVSGTNGTKRFANPVLPFNDGVYFASTEKSNIIRGWIFGTTLDS K TQSLLIVNNATNVVIKVCEFQFCNDPFLGVYYHKNNKSWMESEFRVYSSA NNCTFEYVSQPFLMDLEGKQGNFKNLREFVFKNIDGYFKIYSKHTPINLV R GLPQGFSALEPLVDLPIGINITRFQTLHRSYLTPGDSSSGWTAGAAAYYV G YLQPRTFLLKYNENGTITDAVDCALDPLSETKCTLKSFTVEKGIYQTSNF R VQPTESIVRFPNITNLCPFGEVFNATRFASVYAWNRKRISNCVADYSVLY N SASFSTFKCYGVSPTKLNDLCFTNVYADSFVIRGDEVRQIAPGQTGNIAD Y NYKLPDDFTGCVIAWNSNNLDSKVGGNYNYLYRLFRKSNLKPFERDISTE IYQAGSTPCNGVKGFNCYFPLQSYGFQPTYGVGYQPYRVVVLSFELLHAP ATVCGPKKSTNLVKNKCVNFNFNGLTGTGVLTESNKKFLPFQQFGRDIAD TTDAVRDPQTLEILDITPCSFGGVSVITPGTNTSNQVAVLYQGVNCTEVP V AIHADQLTPTWRVYSTGSNVFQTRAGCLIGAEHVNNSYECDIPIGAGICA S YQTQTNSPGSASSVASQSIIAYTMSLGVENSVAYSNNSIAIPTNFTISVT TEI LPVSMTKTSVDCTMYICGDSTECSNLLLQYGSFCTQLNRALTGIAVEQDK NTQEVFAQVKQIYKTPPIKDFGGFNFSQILPDPSKPSKRSFIEDLLFNKV TL ADAGFIKQYGDCLGDIAARDLICAQKFNGLTVLPPLLTDEMIAQYTSALL AGTITSGWTFGAGAALQIPFAMQMAYRFNGIGVTQNVLYENQKLIANQF NSAIGKIQDSLSSTASALGKLQDVVNQNAQALNTLVKQLSSNFGAISSVL N DILSRLDPPEAEVQIDRLITGRLQSLQTYVTQQLIRAAEIRASANLAATK MS ECVLGQSKRVDFCGKGYHLMSFPQSAPHGVVFLHVTYVPAQEKNFTTAP AICHDGKAHFPREGVFVSNGTHWFVTQRNFYEPQIITTDNTFVSGNCDVV I GIVNNTVYDPLQSELDSIKEELDKIHKNGSGGSGDIIKLLNEQVNKEMQS S NLYMSMSSWCYTHSLDGAGLFLFDHAAEEYEHAKKLIIFLNENNVPVQL TSISAPEHKFEGLTQIFQKAYEHEQHISESINNIVDHAIKSKDHATFNFL QW YVAEQHEEEVLFKDILDKIELIGNENHGLYLADQYVKGIAKSRKSGS | 234 |
| | | pCoV1B-06-PL-B.1.351/501Y.V2-L18F_D80_D215G_delta241-243_R246_K417N_E484K_N501Y_D614G_A701V | | SSQCVNFTTRTQLPPAYTNSFTRGVYYPDKVFRSSVLHSTQDLFLPFFSN V TWFHAIHVSGTNGTKRFDNPVLPFNDGVYFASTEKSNIIRGWIFGTTLDS K TQSLLIVNNATNVVIKVCEFQFCNDPFLGVYYHKNNKSWMESEFRVYSSA NNCTFEYVSQPFLMDLEGKQGNFKNLREFVFKNIDGYFKIYSKHTPINLV R GLPQGFSALEPLVDLPIGINITRFQTLHRSYLTPGDSSSGWTAGAAAYYV G YLQPRTFLLKYNENGTITDAVDCALDPLSETKCTLKSFTVEKGIYQTSNF R VQPTESIVRFPNITNLCPFGEVFNATRFASVYAWNRKRISNCVADYSVLY N SASFSTFKCYGVSPTKLNDLCFTNVYADSFVIRGDEVRQIAPGQTGNIAD Y NYKLPDDFTGCVIAWNSNNLDSKVGGNYNYLYRLFRKSNLKPFERDISTE IYQAGSTPCNGVKGFNCYFPLQSYGFQPTYGVGYQPYRVVVLSFELLHAP ATVCGPKKSTNLVKNKCVNFNFNGLTGTGVLTESNKKFLPFQQFGRDIAD TTDAVRDPQTLEILDITPCSFGGVSVITPGTNTSNQVAVLYQGVNCTEVP V AIHADQLTPTWRVYSTGSNVFQTRAGCLIGAEHVNNSYECDIPIGAGICA S YQTQTNSPGSASSVASQSIIAYTMSLGVENSVAYSNNSIAIPTNFTISVT TEI LPVSMTKTSVDCTMYICGDSTECSNLLLQYGSFCTQLNRALTGIAVEQDK NTQEVFAQVKQIYKTPPIKDFGGFNFSQILPDPSKPSKRSFIEDLLFNKV TL ADAGFIKQYGDCLGDIAARDLICAQKFNGLTVLPPLLTDEMIAQYTSALL AGTITSGWTFGAGAALQIPFAMQMAYRFNGIGVTQNVLYENQKLIANQF NSAIGKIQDSLSSTASALGKLQDVVNQNAQALNTLVKQLSSNFGAISSVL N DILSRLDPPEAEVQIDRLITGRLQSLQTYVTQQLIRAAEIRASANLAATK MS ECVLGQSKRVDFCGKGYHLMSFPQSAPHGVVFLHVTYVPAQEKNFTTAP AICHDGKAHFPREGVFVSNGTHWFVTQRNFYEPQIITTDNTFVSGNCDVV I GIVNNTVYDPLQSELDSIKEELDKIHKNGSGGSGDIIKLLNEQVNKEMQS S NLYMSMSSWCYTHSLDGAGLFLFDHAAEEYEHAKKLIIFLNENNVPVQL TSISAPEHKFEGLTQIFQKAYEHEQHISESINNIVDHAIKSKDHATFNFL QW YVAEQHEEEVLFKDILDKIELIGNENHGLYLADQYVKGIAKSRKSGS | 235 |
| | | pCoV1B-06-PL-B.1.351/501Y.V2-L18F_D80A_D215_delta241243_R246_K417N_E484K_N501Y_D614G_A701V | | SSQCVNFTTRTQLPPAYTNSFTRGVYYPDKVFRSSVLHSTQDLFLPFFSN V TWFHAIHVSGTNGTKRFANPVLPFNDGVYFASTEKSNIIRGWIFGTTLDS K TQSLLIVNNATNVVIKVCEFQFCNDPFLGVYYHKNNKSWMESEFRVYSSA NNCTFEYVSQPFLMDLEGKQGNFKNLREFVFKNIDGYFKIYSKHTPINLV R DLPQGFSALEPLVDLPIGINITRFQTLHRSYLTPGDSSSGWTAGAAAYYV G YLQPRTFLLKYNENGTITDAVDCALDPLSETKCTLKSFTVEKGIYQTSNF R VQPTESIVRFPNITNLCPFGEVFNATRFASVYAWNRKRISNCVADYSVLY N SASFSTFKCYGVSPTKLNDLCFTNVYADSFVIRGDEVRQIAPGQTGNIAD Y NYKLPDDFTGCVIAWNSNNLDSKVGGNYNYLYRLFRKSNLKPFERDISTE IYQAGSTPCNGVKGFNCYFPLQSYGFQPTYGVGYQPYRVVVLSFELLHAP ATVCGPKKSTNLVKNKCVNFNFNGLTGTGVLTESNKKFLPFQQFGRDIAD TTDAVRDPQTLEILDITPCSFGGVSVITPGTNTSNQVAVLYQGVNCTEVP V AIHADQLTPTWRVYSTGSNVFQTRAGCLIGAEHVNNSYECDIPIGAGICA S YQTQTNSPGSASSVASQSIIAYTMSLGVENSVAYSNNSIAIPTNFTISVT TEI LPVSMTKTSVDCTMYICGDSTECSNLLLQYGSFCTQLNRALTGIAVEQDK NTQEVFAQVKQIYKTPPIKDFGGFNFSQILPDPSKPSKRSFIEDLLFNKV TL ADAGFIKQYGDCLGDIAARDLICAQKFNGLTVLPPLLTDEMIAQYTSALL AGTITSGWTFGAGAALQIPFAMQMAYRFNGIGVTQNVLYENQKLIANQF NSAIGKIQDSLSSTASALGKLQDVVNQNAQALNTLVKQLSSNFGAISSVL N DILSRLDPPEAEVQIDRLITGRLQSLQTYVTQQLIRAAEIRASANLAATK MS ECVLGQSKRVDFCGKGYHLMSFPQSAPHGVVFLHVTYVPAQEKNFTTAP AICHDGKAHFPREGVFVSNGTHWFVTQRNFYEPQIITTDNTFVSGNCDVV I GIVNNTVYDPLQSELDSIKEELDKIHKNGSGGSGDIIKLLNEQVNKEMQS S NLYMSMSSWCYTHSLDGAGLFLFDHAAEEYEHAKKLIIFLNENNVPVQL TSISAPEHKFEGLTQIFQKAYEHEQHISESINNIVDHAIKSKDHATFNFL QW YVAEQHEEEVLFKDILDKIELIGNENHGLYLADQYVKGIAKSRKSGS | 236 |
| | | pCoV1B-06-P.1/501Y.V3-L18F_T20N_P26S_D138Y_R190S_K417T_E484K_N501Y_D614G_H655Y_T1027I | | SSQCVNFTNRTQLPSAYTNSFTRGVYYPDKVFRSSVLHSTQDLFLPFFSN V TWFHAIHVSGTNGTKRFDNPVLPFNDGVYFASTEKSNIIRGWIFGTTLDS K TQSLLIVNNATNVVIKVCEFQFCNYPFLGVYYHKNNKSWMESEFRVYSSA NNCTFEYVSQPFLMDLEGKQGNFKNLSEFVFKNIDGYFKIYSKHTPINLV R DLPQGFSALEPLVDLPIGINITRFQTLLALHRSYLTPGDSSSGWTAGAAA Y YVGYLQPRTFLLKYNENGTITDAVDCALDPLSETKCTLKSFTVEKGIYQT S NFRVQPTESIVRFPNITNLCPFGEVFNATRFASVYAWNRKRISNCVADYS V LYNSASFSTFKCYGVSPTKLNDLCFTNVYADSFVIRGDEVRQIAPGQTGT I ADYNYKLPDDFTGCVIAWNSNNLDSKVGGNYNYLYRLFRKSNLKPFERD ISTEIYQAGSTPCNGVKGFNCYFPLQSYGFQPTYGVGYQPYRVVVLSFEL L HAPATVCGPKKSTNLVKNKCVNFNFNGLTGTGVLTESNKKFLPFQQFGR DIADTTDAVRDPQTLEILDITPCSFGGVSVITPGTNTSNQVAVLYQGVNC T EVPVAIHADQLTPTWRVYSTGSNVFQTRAGCLIGAEYVNNSYECDIPIGA GICASYQTQTNSPGSASSVASQSIIAYTMSLGAENSVAYSNNSIAIPTNF TIS VTTEILPVSMTKTSVDCTMYICGDSTECSNLLLQYGSFCTQLNRALTGIA V EQDKNTQEVFAQVKQIYKTPPIKDFGGFNFSQILPDPSKPSKRSFIEDLL FN KVTLADAGFIKQYGDCLGDIAARDLICAQKFNGLTVLPPLLTDEMIAQYT SALLAGTITSGWTFGAGAALQIPFAMQMAYRFNGIGVTQNVLYENQKLIA NQFNSAIGKIQDSLSSTASALGKLQDVVNQNAQALNTLVKQLSSNFGAIS S VLNDILSRLDPPEAEVQIDRLITGRLQSLQTYVTQQLIRAAEIRASANLA AI KMSECVLGQSKRVDFCGKGYHLMSFPQSAPHGVVFLHVTYVPAQEKNFT TAPAICHDGKAHFPREGVFVSNGTHWFVTQRNFYEPQIITTDNTFVSGNC DVVIGIVNNTVYDPLQSELDSIKEELDKIHKNGSGGSGDIIKLLNEQVNK E MQSSNLYMSMSSWCYTHSLDGAGLFLFDHAAEEYEHAKKLIIFLNENNV PVQLTSISAPEHKFEGLTQIFQKAYEHEQHISESINNIVDHAIKSKDHAT FNF LQWYVAEQHEEEVLFKDILDKIELIGNENHGLYLADQYVKGIAKSRKSGS | 237 |
| | | pCoV187-B.1.1.7/501Y.V1-delta69-70_delta144-N501Y-A570D-D614G-P681H-T716I-S982A-D1118H | | SSQCVNLTTRTQLPPAYTNSFTRGVYYPDKVFRSSVLHSTQDLFLPFFSN V TWFHAISGTNGTKRFDNPVLPFNDGVYFASTEKSNIIRGWIFGTTLDSKT Q SLLIVNNATNVVIKVCEFQFCNDPFLGVYHKNNKSWMESEFRVYSSANN CTFEYVSQPFLMDLEGKQGNFKNLREFVFKNIDGYFKIYSKHTPINLVRD L PQGFSALEPLVDLPIGINITRFQTLLALHRSYLTPGDSSSGWTAGAAAYY V GYLQPRTFLLKYNENGTITDAVDCALDPLSETKCTLKSFTVEKGIYQTSN F RVQPTESIVRFPNITNLCPFGEVFNATRFASVYAWNRKRISNCVADYSVL Y NSASFSTFKCYGVSPTKLNDLCFTNVYADSFVIRGDEVRQIAPGQTGKIA D YNYKLPDDFTGCVIAWNSNNLDSKVGGNYNYLYRLFRKSNLKPFERDIST EIYQAGSTPCNGVEGFNCYFPLQSYGFQPTYGVGYQPYRVVVLSFELLHA PATVCGPKKSTNLVKNKCVNFNFNGLTGTGVLTESNKKFLPFQQFGRDID DTTDAVRDPQTLEILDITPCSFGGVSVITPGTNTSNQVAVLYQGVNCTEV P VAIHADQLTPTWRVYSTGSNVFQTRAGCLIGAEHVNNSYECDIPIGAGIC A SYQTQTNSHGSASSVASQSIIAYTMSLGAENSVAYSNNSIAIPINFTISV TTE ILPVSMTKTSVDCTMYICGDSTECSNLLLQYGSFCTQLNRALTGIAVEQD K NTQEVFAQVKQIYKTPPIKDFGGFNFSQILPDPSKPSKRSFIEDLLFNKV TL ADAGFIKQYGDCLGDIAARDLICAQKFNGLTVLPPLLTDEMIAQYTSALL AGTITSGWTFGAGAALQIPFAMQMAYRFNGIGVTQNVLYENQKLIANQF NSAIGKIQDSLSSTASALGKLQDVVNQNAQALNTLVKQLSSNFGAISSVL N DILARLDPPEAEVQIDRLITGRLQSLQTYVTQQLIRAAEIRASANLAATK M SECVLGQSKRVDFCGKGYHLMSFPQSAPHGVVFLHVTYVPAQEKNFTTA PAICHDGKAHFPREGVFVSNGTHWFVTQRNFYEPQIITTHNTFVSGNCDV VIGIVNNTVYDPLQSELDSIKEELDKIHKNLDSIKEELDKIHKNGSGGSG DII KLLNEQVNKEMQSSNLYMSMSSWCYTHSLDGAGLFLFDHAAEEYEHAK KLIIFLNENNVPVQLTSISAPEHKFEGLTQIFQKAYEHEQHISESINNIV DHAI KSKDHATFNFLQWYVAEQHEEEVLFKDILDKIELIGNENHGLYLADQYVK GIAKSRKSGS | 238 |
| | | pCoV187-B.1.351/501Y.V2-L18F_D80A_D215G_delta241-243_R246I_K417N_E484K_N501Y_D614G_A701V | | SSQCVNFTTRTQLPPAYTNSFTRGVYYPDKVFRSSVLHSTQDLFLPFFSN V TWFHAIHVSGTNGTKRFANPVLPFNDGVYFASTEKSNIIRGWIFGTTLDS K TQSLLIVNNATNVVIKVCEFQFCNDPFLGVYYHKNNKSWMESEFRVYSSA NNCTFEYVSQPFLMDLEGKQGNFKNLREFVFKNIDGYFKIYSKHTPINLV R GLPQGFSALEPLVDLPIGINITRFQTLHISYLTPGDSSSGWTAGAAAYYV G YLQPRTFLLKYNENGTITDAVDCALDPLSETKCTLKSFTVEKGIYQTSNF R VQPTESIVRFPNITNLCPFGEVFNATRFASVYAWNRKRISNCVADYSVLY N SASFSTFKCYGVSPTKLNDLCFTNVYADSFVIRGDEVRQIAPGQTGNIAD Y NYKLPDDFTGCVIAWNSNNLDSKVGGNYNYLYRLFRKSNLKPFERDISTE IYQAGSTPCNGVKGFNCYFPLQSYGFQPTYGVGYQPYRVVVLSFELLHAP ATVCGPKKSTNLVKNKCVNFNFNGLTGTGVLTESNKKFLPFQQFGRDIAD TTDAVRDPQTLEILDITPCSFGGVSVITPGTNTSNQVAVLYQGVNCTEVP V AIHADQLTPTWRVYSTGSNVFQTRAGCLIGAEHVNNSYECDIPIGAGICA S YQTQTNSPGSASSVASQSIIAYTMSLGVENSVAYSNNSIAIPTNFTISVT TEI LPVSMTKTSVDCTMYICGDSTECSNLLLQYGSFCTQLNRALTGIAVEQDK NTQEVFAQVKQIYKTPPIKDFGGFNFSQILPDPSKPSKRSFIEDLLFNKV TL ADAGFIKQYGDCLGDIAARDLICAQKFNGLTVLPPLLTDEMIAQYTSALL AGTITSGWTFGAGAALQIPFAMQMAYRFNGIGVTQNVLYENQKLIANQF NSAIGKIQDSLSSTASALGKLQDVVNQNAQALNTLVKQLSSNFGAISSVL N DILSRLDPPEAEVQIDRLITGRLQSLQTYVTQQLIRAAEIRASANLAATK MS ECVLGQSKRVDFCGKGYHLMSFPQSAPHGVVFLHVTYVPAQEKNFTTAP AICHDGKAHFPREGVFVSNGTHWFVTQRNFYEPQIITTDNTFVSGNCDVV I GIVNNTVYDPLQSELDSIKEELDKIHKNLDSIKEELDKIHKNGSGGSGDI IK LLNEQVNKEMQSSNLYMSMSSWCYTHSLDGAGLFLFDHAAEEYEHAKK LIIFLNENNVPVQLTSISAPEHKFEGLTQIFQKAYEHEQHISESINNIVD HAIK SKDHATFNFLQWYVAEQHEEEVLFKDILDKIELIGNENHGLYLADQYVKG IAKSRKSGS | 239 |
| | | pCoV187-B.1.351/501Y. V2-L18F_D80_D2 15G_delta241- 243_R246I_K417N_E484K_N501Y_D614G_A701V | | SSQCVNFTTRTQLPPAYTNSFTRGVYYPDKVFRSSVLHSTQDLFLPFFSN V TWFHAIHVSGTNGTKRFDNPVLPFNDGVYFASTEKSNIIRGWIFGTTLDS K TQSLLIVNNATNVVIKVCEFQFCNDPFLGVYYHKNNKSWMESEFRVYSSA NNCTFEYVSQPFLMDLEGKQGNFKNLREFVFKNIDGYFKIYSKHTPINLV R GLPQGFSALEPLVDLPIGINITRFQTLHISYLTPGDSSSGWTAGAAAYYV G YLQPRTFLLKYNENGTITDAVDCALDPLSETKCTLKSFTVEKGIYQTSNF R VQPTESIVRFPNITNLCPFGEVFNATRFASVYAWNRKRISNCVADYSVLY N SASFSTFKCYGVSPTKLNDLCFTNVYADSFVIRGDEVRQIAPGQTGNIAD Y NYKLPDDFTGCVIAWNSNNLDSKVGGNYNYLYRLFRKSNLKPFERDISTE IYQAGSTPCNGVKGFNCYFPLQSYGFQPTYGVGYQPYRVVVLSFELLHAP ATVCGPKKSTNLVKNKCVNFNFNGLTGTGVLTESNKKFLPFQQFGRDIAD TTDAVRDPQTLEILDITPCSFGGVSVITPGTNTSNQVAVLYQGVNCTEVP V AIHADQLTPTWRVYSTGSNVFQTRAGCLIGAEHVNNSYECDIPIGAGICA S YQTQTNSPGSASSVASQSIIAYTMSLGVENSVAYSNNSIAIPTNFTISVT TEI LPVSMTKTSVDCTMYICGDSTECSNLLLQYGSFCTQLNRALTGIAVEQDK NTQEVFAQVKQIYKTPPIKDFGGFNFSQILPDPSKPSKRSFIEDLLFNKV TL ADAGFIKQYGDCLGDIAARDLICAQKFNGLTVLPPLLTDEMIAQYTSALL AGTITSGWTFGAGAALQIPFAMQMAYRFNGIGVTQNVLYENQKLIANQF NSAIGKIQDSLSSTASALGKLQDVVNQNAQALNTLVKQLSSNFGAISSVL N DILSRLDPPEAEVQIDRLITGRLQSLQTYVTQQLIRAAEIRASANLAATK MS ECVLGQSKRVDFCGKGYHLMSFPQSAPHGVVFLHVTYVPAQEKNFTTAP AICHDGKAHFPREGVFVSNGTHWFVTQRNFYEPQIITTDNTFVSGNCDVV I GIVNNTVYDPLQSELDSIKEELDKIHKNLDSIKEELDKIHKNGSGGSGDI IK LLNEQVNKEMQSSNLYMSMSSWCYTHSLDGAGLFLFDHAAEEYEHAKK LIIFLNENNVPVQLTSISAPEHKFEGLTQIFQKAYEHEQHISESINNIVD HAIK SKDHATFNFLQWYVAEQHEEEVLFKDILDKIELIGNENHGLYLADQYVKG IAKSRKSGS | 240 |
| | | pCoV187-B.1.351/501Y.V2-L18F_D80A_ D215_delta241 243_R246I_K 417N_E484K_ N501Y_D614 G_A701V | | SSQCVNFTTRTQLPPAYTNSFTRGVYYPDKVFRSSVLHSTQDLFLPFFSN V TWFHAIHVSGTNGTKRFANPVLPFNDGVYFASTEKSNIIRGWIFGTTLDS K TQSLLIVNNATNVVIKVCEFQFCNDPFLGVYYHKNNKSWMESEFRVYSSA NNCTFEYVSQPFLMDLEGKQGNFKNLREFVFKNIDGYFKIYSKHTPINLV R DLPQGFSALEPLVDLPIGINITRFQTLHISYLTPGDSSSGWTAGAAAYYV G YLQPRTFLLKYNENGTITDAVDCALDPLSETKCTLKSFTVEKGIYQTSNF R VQPTESIVRFPNITNLCPFGEVFNATRFASVYAWNRKRISNCVADYSVLY N SASFSTFKCYGVSPTKLNDLCFTNVYADSFVIRGDEVRQIAPGQTGNIAD Y NYKLPDDFTGCVIAWNSNNLDSKVGGNYNYLYRLFRKSNLKPFERDISTE IYQAGSTPCNGVKGFNCYFPLQSYGFQPTYGVGYQPYRVVVLSFELLHAP ATVCGPKKSTNLVKNKCVNFNFNGLTGTGVLTESNKKFLPFQQFGRDIAD TTDAVRDPQTLEILDITPCSFGGVSVITPGTNTSNQVAVLYQGVNCTEVP V AIHADQLTPTWRVYSTGSNVFQTRAGCLIGAEHVNNSYECDIPIGAGICA S YQTQTNSPGSASSVASQSIIAYTMSLGVENSVAYSNNSIAIPTNFTISVT TEI LPVSMTKTSVDCTMYICGDSTECSNLLLQYGSFCTQLNRALTGIAVEQDK NTQEVFAQVKQIYKTPPIKDFGGFNFSQILPDPSKPSKRSFIEDLLFNKV TL ADAGFIKQYGDCLGDIAARDLICAQKFNGLTVLPPLLTDEMIAQYTSALL AGTITSGWTFGAGAALQIPFAMQMAYRFNGIGVTQNVLYENQKLIANQF NSAIGKIQDSLSSTASALGKLQDVVNQNAQALNTLVKQLSSNFGAISSVL N DILSRLDPPEAEVQIDRLITGRLQSLQTYVTQQLIRAAEIRASANLAATK MS ECVLGQSKRVDFCGKGYHLMSFPQSAPHGVVFLHVTYVPAQEKNFTTAP AICHDGKAHFPREGVFVSNGTHWFVTQRNFYEPQIITTDNTFVSGNCDVV I GIVNNTVYDPLQSELDSIKEELDKIHKNLDSIKEELDKIHKNGSGGSGDI IK LLNEQVNKEMQSSNLYMSMSSWCYTHSLDGAGLFLFDHAAEEYEHAKK LIIFLNENNVPVQLTSISAPEHKFEGLTQIFQKAYEHEQHISESINNIVD HAIK SKDHATFNFLQWYVAEQHEEEVLFKDILDKIELIGNENHGLYLADQYVKG IAKSRKSGS | 241 |
| | | pCoV187-B.1.351/501Y.V2-L18F_D80A_D215G_delta241-243_R246_K417N_E484K_N501Y_D614G_A701V | | SSQCVNFTTRTQLPPAYTNSFTRGVYYPDKVFRSSVLHSTQDLFLPFFSN V TWFHAIHVSGTNGTKRFANPVLPFNDGVYFASTEKSNIIRGWIFGTTLDS K TQSLLIVNNATNVVIKVCEFQFCNDPFLGVYYHKNNKSWMESEFRVYSSA NNCTFEYVSQPFLMDLEGKQGNFKNLREFVFKNIDGYFKIYSKHTPINLV R GLPQGFSALEPLVDLPIGINITRFQTLHRSYLTPGDSSSGWTAGAAAYYV G YLQPRTFLLKYNENGTITDAVDCALDPLSETKCTLKSFTVEKGIYQTSNF R VQPTESIVRFPNITNLCPFGEVFNATRFASVYAWNRKRISNCVADYSVLY N SASFSTFKCYGVSPTKLNDLCFTNVYADSFVIRGDEVRQIAPGQTGNIAD Y NYKLPDDFTGCVIAWNSNNLDSKVGGNYNYLYRLFRKSNLKPFERDISTE IYQAGSTPCNGVKGFNCYFPLQSYGFQPTYGVGYQPYRVVVLSFELLHAP ATVCGPKKSTNLVKNKCVNFNFNGLTGTGVLTESNKKFLPFQQFGRDIAD TTDAVRDPQTLEILDITPCSFGGVSVITPGTNTSNQVAVLYQGVNCTEVP V AIHADQLTPTWRVYSTGSNVFQTRAGCLIGAEHVNNSYECDIPIGAGICA S YQTQTNSPGSASSVASQSIIAYTMSLGVENSVAYSNNSIAIPTNFTISVT TEI LPVSMTKTSVDCTMYICGDSTECSNLLLQYGSFCTQLNRALTGIAVEQDK NTQEVFAQVKQIYKTPPIKDFGGFNFSQILPDPSKPSKRSFIEDLLFNKV TL ADAGFIKQYGDCLGDIAARDLICAQKFNGLTVLPPLLTDEMIAQYTSALL AGTITSGWTFGAGAALQIPFAMQMAYRFNGIGVTQNVLYENQKLIANQF NSAIGKIQDSLSSTASALGKLQDVVNQNAQALNTLVKQLSSNFGAISSVL N DILSRLDPPEAEVQIDRLITGRLQSLQTYVTQQLIRAAEIRASANLAATK MS ECVLGQSKRVDFCGKGYHLMSFPQSAPHGVVFLHVTYVPAQEKNFTTAP AICHDGKAHFPREGVFVSNGTHWFVTQRNFYEPQIITTDNTFVSGNCDVV I GIVNNTVYDPLQSELDSIKEELDKIHKNLDSIKEELDKIHKNGSGGSGDI IK LLNEQVNKEMQSSNLYMSMSSWCYTHSLDGAGLFLFDHAAEEYEHAKK LIIFLNENNVPVQLTSISAPEHKFEGLTQIFQKAYEHEQHISESINNIVD HAIK SKDHATFNFLQWYVAEQHEEEVLFKDILDKIELIGNENHGLYLADQYVKG IAKSRKSGS | 242 |
| | | pCoV187-B.1.351/501Y.V2-L18F_D80_D215G_delta241-243_R246_K417N_E484K_N501Y_D614G_A701V | | SSQCVNFTTRTQLPPAYTNSFTRGVYYPDKVFRSSVLHSTQDLFLPFFSN V TWFHAIHVSGTNGTKRFDNPVLPFNDGVYFASTEKSNIIRGWIFGTTLDS K TQSLLIVNNATNVVIKVCEFQFCNDPFLGVYYHKNNKSWMESEFRVYSSA NNCTFEYVSQPFLMDLEGKQGNFKNLREFVFKNIDGYFKIYSKHTPINLV R GLPQGFSALEPLVDLPIGINITRFQTLHRSYLTPGDSSSGWTAGAAAYYV G YLQPRTFLLKYNENGTITDAVDCALDPLSETKCTLKSFTVEKGIYQTSNF R VQPTESIVRFPNITNLCPFGEVFNATRFASVYAWNRKRISNCVADYSVLY N SASFSTFKCYGVSPTKLNDLCFTNVYADSFVIRGDEVRQIAPGQTGNIAD Y NYKLPDDFTGCVIAWNSNNLDSKVGGNYNYLYRLFRKSNLKPFERDISTE IYQAGSTPCNGVKGFNCYFPLQSYGFQPTYGVGYQPYRVVVLSFELLHAP ATVCGPKKSTNLVKNKCVNFNFNGLTGTGVLTESNKKFLPFQQFGRDIAD TTDAVRDPQTLEILDITPCSFGGVSVITPGTNTSNQVAVLYQGVNCTEVP V AIHADQLTPTWRVYSTGSNVFQTRAGCLIGAEHVNNSYECDIPIGAGICA S YQTQTNSPGSASSVASQSIIAYTMSLGVENSVAYSNNSIAIPTNFTISVT TEI LPVSMTKTSVDCTMYICGDSTECSNLLLQYGSFCTQLNRALTGIAVEQDK NTQEVFAQVKQIYKTPPIKDFGGFNFSQILPDPSKPSKRSFIEDLLFNKV TL ADAGFIKQYGDCLGDIAARDLICAQKFNGLTVLPPLLTDEMIAQYTSALL AGTITSGWTFGAGAALQIPFAMQMAYRFNGIGVTQNVLYENQKLIANQF NSAIGKIQDSLSSTASALGKLQDVVNQNAQALNTLVKQLSSNFGAISSVL N DILSRLDPPEAEVQIDRLITGRLQSLQTYVTQQLIRAAEIRASANLAATK MS ECVLGQSKRVDFCGKGYHLMSFPQSAPHGVVFLHVTYVPAQEKNFTTAP AICHDGKAHFPREGVFVSNGTHWFVTQRNFYEPQIITTDNTFVSGNCDVV I GIVNNTVYDPLQSELDSIKEELDKIHKNLDSIKEELDKIHKNGSGGSGDI IK LLNEQVNKEMQSSNLYMSMSSWCYTHSLDGAGLFLFDHAAEEYEHAKK LIIFLNENNVPVQLTSISAPEHKFEGLTQIFQKAYEHEQHISESINNIVD HAIK SKDHATFNFLQWYVAEQHEEEVLFKDILDKIELIGNENHGLYLADQYVKG IAKSRKSGS | 243 |
| | | pCoV187-B.1.351/501Y.V2-L18F_D80A_D215_delta241243_R246_K417N_E484K_N501Y_D614G_A701V | | SSQCVNFTTRTQLPPAYTNSFTRGVYYPDKVFRSSVLHSTQDLFLPFFSN V TWFHAIHVSGTNGTKRFANPVLPFNDGVYFASTEKSNIIRGWIFGTTLDS K TQSLLIVNNATNVVIKVCEFQFCNDPFLGVYYHKNNKSWMESEFRVYSSA NNCTFEYVSQPFLMDLEGKQGNFKNLREFVFKNIDGYFKIYSKHTPINLV R DLPQGFSALEPLVDLPIGINITRFQTLHRSYLTPGDSSSGWTAGAAAYYV G YLQPRTFLLKYNENGTITDAVDCALDPLSETKCTLKSFTVEKGIYQTSNF R VQPTESIVRFPNITNLCPFGEVFNATRFASVYAWNRKRISNCVADYSVLY N SASFSTFKCYGVSPTKLNDLCFTNVYADSFVIRGDEVRQIAPGQTGNIAD Y NYKLPDDFTGCVIAWNSNNLDSKVGGNYNYLYRLFRKSNLKPFERDISTE IYQAGSTPCNGVKGFNCYFPLQSYGFQPTYGVGYQPYRVVVLSFELLHAP ATVCGPKKSTNLVKNKCVNFNFNGLTGTGVLTESNKKFLPFQQFGRDIAD TTDAVRDPQTLEILDITPCSFGGVSVITPGTNTSNQVAVLYQGVNCTEVP V AIHADQLTPTWRVYSTGSNVFQTRAGCLIGAEHVNNSYECDIPIGAGICA S YQTQTNSPGSASSVASQSIIAYTMSLGVENSVAYSNNSIAIPTNFTISVT TEI LPVSMTKTSVDCTMYICGDSTECSNLLLQYGSFCTQLNRALTGIAVEQDK NTQEVFAQVKQIYKTPPIKDFGGFNFSQILPDPSKPSKRSFIEDLLFNKV TL ADAGFIKQYGDCLGDIAARDLICAQKFNGLTVLPPLLTDEMIAQYTSALL AGTITSGWTFGAGAALQIPFAMQMAYRFNGIGVTQNVLYENQKLIANQF NSAIGKIQDSLSSTASALGKLQDVVNQNAQALNTLVKQLSSNFGAISSVL N DILSRLDPPEAEVQIDRLITGRLQSLQTYVTQQLIRAAEIRASANLAATK MS ECVLGQSKRVDFCGKGYHLMSFPQSAPHGVVFLHVTYVPAQEKNFTTAP AICHDGKAHFPREGVFVSNGTHWFVTQRNFYEPQIITTDNTFVSGNCDVV I GIVNNTVYDPLQSELDSIKEELDKIHKNLDSIKEELDKIHKNGSGGSGDI IK LLNEQVNKEMQSSNLYMSMSSWCYTHSLDGAGLFLFDHAAEEYEHAKK LIIFLNENNVPVQLTSISAPEHKFEGLTQIFQKAYEHEQHISESINNIVD HAIK SKDHATFNFLQWYVAEQHEEEVLFKDILDKIELIGNENHGLYLADQYVKG IAKSRKSGS | 244 |
| | | pCoV187-P.1/501Y.V3-L18F_T20N_P26S_D138Y_R190S_K417T_E484K_N501Y_D614G_H655Y_T1027I | | SSQCVNFTNRTQLPSAYTNSFTRGVYYPDKVFRSSVLHSTQDLFLPFFSN V TWFHAIHVSGTNGTKRFDNPVLPFNDGVYFASTEKSNIIRGWIFGTTLDS K TQSLLIVNNATNVVIKVCEFQFCNYPFLGVYYHKNNKSWMESEFRVYSSA NNCTFEYVSQPFLMDLEGKQGNFKNLSEFVFKNIDGYFKIYSKHTPINLV R DLPQGFSALEPLVDLPIGINITRFQTLLALHRSYLTPGDSSSGWTAGAAA Y YVGYLQPRTFLLKYNENGTITDAVDCALDPLSETKCTLKSFTVEKGIYQT S NFRVQPTESIVRFPNITNLCPFGEVFNATRFASVYAWNRKRISNCVADYS V LYNSASFSTFKCYGVSPTKLNDLCFTNVYADSFVIRGDEVRQIAPGQTGT I ADYNYKLPDDFTGCVIAWNSNNLDSKVGGNYNYLYRLFRKSNLKPFERD ISTEIYQAGSTPCNGVKGFNCYFPLQSYGFQPTYGVGYQPYRVVVLSFEL L HAPATVCGPKKSTNLVKNKCVNFNFNGLTGTGVLTESNKKFLPFQQFGR DIADTTDAVRDPQTLEILDITPCSFGGVSVITPGTNTSNQVAVLYQGVNC T EVPVAIHADQLTPTWRVYSTGSNVFQTRAGCLIGAEYVNNSYECDIPIGA GICASYQTQTNSPGSASSVASQSIIAYTMSLGAENSVAYSNNSIAIPTNF TIS VTTEILPVSMTKTSVDCTMYICGDSTECSNLLLQYGSFCTQLNRALTGIA V EQDKNTQEVFAQVKQIYKTPPIKDFGGFNFSQILPDPSKPSKRSFIEDLL FN KVTLADAGFIKQYGDCLGDIAARDLICAQKFNGLTVLPPLLTDEMIAQYT SALLAGTITSGWTFGAGAALQIPFAMQMAYRFNGIGVTQNVLYENQKLIA NQFNSAIGKIQDSLSSTASALGKLQDVVNQNAQALNTLVKQLSSNFGAIS S VLNDILSRLDPPEAEVQIDRLITGRLQSLQTYVTQQLIRAAEIRASANLA AI KMSECVLGQSKRVDFCGKGYHLMSFPQSAPHGVVFLHVTYVPAQEKNFT TAPAICHDGKAHFPREGVFVSNGTHWFVTQRNFYEPQIITTDNTFVSGNC DVVIGIVNNTVYDPLQSELDSIKEELDKIHKNLDSIKEELDKIHKNGSGG SG DIIKLLNEQVNKEMQSSNLYMSMSSWCYTHSLDGAGLFLFDHAAEEYEH AKKLIIFLNENNVPVQLTSISAPEHKFEGLTQIFQKAYEHEQHISESINN IVD HAIKSKDHATFNFLQWYVAEQHEEEVLFKDILDKIELIGNENHGLYLADQ YVKGIAKSRKSGS | 245 |
| | | pCoV186-B.1.1.7/501Y.V1-delta69-70_deltal44-N501Y-A570D-D614G-P681H-T716I-S982A-D1118H | | SSQCVNLTTRTQLPPAYTNSFTRGVYYPDKVFRSSVLHSTQDLFLPFFSN V TWFHAISGTNGTKRFDNPVLPFNDGVYFASTEKSNIIRGWIFGTTLDSKT Q SLLIVNNATNVVIKVCEFQFCNDPFLGVYHKNNKSWMESEFRVYSSANN CTFEYVSQPFLMDLEGKQGNFKNLREFVFKNIDGYFKIYSKHTPINLVRD L PQGFSALEPLVDLPIGINITRFQTLLALHRSYLTPGDSSSGWTAGAAAYY V GYLQPRTFLLKYNENGTITDAVDCALDPLSETKCTLKSFTVEKGIYQTSN F RVQPTESIVRFPNITNLCPFGEVFNATRFASVYAWNRKRISNCVADYSVL Y NSASFSTFKCYGVSPTKLNDLCFTNVYADSFVIRGDEVRQIAPGQTGKIA D YNYKLPDDFTGCVIAWNSNNLDSKVGGNYNYLYRLFRKSNLKPFERDIST EIYQAGSTPCNGVEGFNCYFPLQSYGFQPTYGVGYQPYRVVVLSFELLHA PATVCGPKKSTNLVKNKCVNFNFNGLTGTGVLTESNKKFLPFQQFGRDID DTTDAVRDPQTLEILDITPCSFGGVSVITPGTNTSNQVAVLYQGVNCTEV P VAIHADQLTPTWRVYSTGSNVFQTRAGCLIGAEHVNNSYECDIPIGAGIC A SYQTQTNSHGSASSVASQSIIAYTMSLGAENSVAYSNNSIAIPINFTISV TTE ILPVSMTKTSVDCTMYICGDSTECSNLLLQYGSFCTQLNRALTGIAVEQD K NTQEVFAQVKQIYKTPPIKDFGGFNFSQILPDPSKPSKRSPIEDLLFNKV TL ADAGFIKQYGDCLGDIAARDLICAQKFNGLTVLPPLLTDEMIAQYTSALL AGTITSGWTFGAGPALQIPFPMQMAYRFNGIGVTQNVLYENQKLIANQFN SAIGKIQDSLSSTPSALGKLQDVVNQNAQALNTLVKQLSSNFGAISSVLN D ILARLDPPEAEVQIDRLITGRLQSLQTYVTQQLIRAAEIRASANLAATKM SE CVLGQSKRVDFCGKGYHLMSFPQSAPHGVVFLHVTYVPAQEKNFTTAPA ICHDGKAHFPREGVFVSNGTHWFVTQRNFYEPQIITTHNTFVSGNCDVVI G IVNNTVYDPLQSELDSIKEELDKIHKNGSGGSGDIIKLLNEQVNKEMQSS N LYMSMSSWCYTHSLDGAGLFLFDHAAEEYEHAKKLIIFLNENNVPVQLTS ISAPEHKFEGLTQIFQKAYEHEQHISESINNIVDHAIKSKDHATFNFLQW YV AEQHEEEVLFKDILDKIELIGNENHGLYLADQYVKGIAKSRKSGS | 246 |
| | | pCoV186-.1.351/501Y.V2-L18F_D80A_D215G_delta241-243_R246I_K417N_E484K_N501Y_D614G_A701V | | SSQCVNFTTRTQLPPAYTNSFTRGVYYPDKVFRSSVLHSTQDLFLPFFSN V TWFHAIHVSGTNGTKRFANPVLPFNDGVYFASTEKSNIIRGWIFGTTLDS K TQSLLIVNNATNVVIKVCEFQFCNDPFLGVYYHKNNKSWMESEFRVYSSA NNCTFEYVSQPFLMDLEGKQGNFKNLREFVFKNIDGYFKIYSKHTPINLV R GLPQGFSALEPLVDLPIGINITRFQTLHISYLTPGDSSSGWTAGAAAYYV G YLQPRTFLLKYNENGTITDAVDCALDPLSETKCTLKSFTVEKGIYQTSNF R VQPTESIVRFPNITNLCPFGEVFNATRFASVYAWNRKRISNCVADYSVLY N SASFSTFKCYGVSPTKLNDLCFTNVYADSFVIRGDEVRQIAPGQTGNIAD Y NYKLPDDFTGCVIAWNSNNLDSKVGGNYNYLYRLFRKSNLKPFERDISTE IYQAGSTPCNGVKGFNCYFPLQSYGFQPTYGVGYQPYRVVVLSFELLHAP ATVCGPKKSTNLVKNKCVNFNFNGLTGTGVLTESNKKFLPFQQFGRDIAD TTDAVRDPQTLEILDITPCSFGGVSVITPGTNTSNQVAVLYQGVNCTEVP V AIHADQLTPTWRVYSTGSNVFQTRAGCLIGAEHVNNSYECDIPIGAGICA S YQTQTNSPGSASSVASQSIIAYTMSLGVENSVAYSNNSIAIPTNFTISVT TEI LPVSMTKTSVDCTMYICGDSTECSNLLLQYGSFCTQLNRALTGIAVEQDK NTQEVFAQVKQIYKTPPIKDFGGFNFSQILPDPSKPSKRSPIEDLLFNKV TL ADAGFIKQYGDCLGDIAARDLICAQKFNGLTVLPPLLTDEMIAQYTSALL AGTITSGWTFGAGPALQIPFPMQMAYRFNGIGVTQNVLYENQKLIANQFN SAIGKIQDSLSSTPSALGKLQDVVNQNAQALNTLVKQLSSNFGAISSVLN D ILSRLDPPEAEVQIDRLITGRLQSLQTYVTQQLIRAAEIRASANLAATKM SE CVLGQSKRVDFCGKGYHLMSFPQSAPHGVVFLHVTYVPAQEKNFTTAPA ICHDGKAHFPREGVFVSNGTHWFVTQRNFYEPQIITTDNTFVSGNCDVVI G IVNNTVYDPLQSELDSIKEELDKIHKNGSGGSGDIIKLLNEQVNKEMQSS N LYMSMSSWCYTHSLDGAGLFLFDHAAEEYEHAKKLIIFLNENNVPVQLTS ISAPEHKFEGLTQIFQKAYEHEQHISESINNIVDHAIKSKDHATFNFLQW YV AEQHEEEVLFKDILDKIELIGNENHGLYLADQYVKGIAKSRKSGS | 247 |
| | | pCoV186-B.1.351/501Y.V2-L18F_D80_D215G_delta241-243_R246I_K417N_E484K_N501Y_D614G_A701V | | SSQCVNFTTRTQLPPAYTNSFTRGVYYPDKVFRSSVLHSTQDLFLPFFSN V TWFHAIHVSGTNGTKRFDNPVLPFNDGVYFASTEKSNIIRGWIFGTTLDS K TQSLLIVNNATNVVIKVCEFQFCNDPFLGVYYHKNNKSWMESEFRVYSSA NNCTFEYVSQPFLMDLEGKQGNFKNLREFVFKNIDGYFKIYSKHTPINLV R GLPQGFSALEPLVDLPIGINITRFQTLHISYLTPGDSSSGWTAGAAAYYV G YLQPRTFLLKYNENGTITDAVDCALDPLSETKCTLKSFTVEKGIYQTSNF R VQPTESIVRFPNITNLCPFGEVFNATRFASVYAWNRKRISNCVADYSVLY N SASFSTFKCYGVSPTKLNDLCFTNVYADSFVIRGDEVRQIAPGQTGNIAD Y NYKLPDDFTGCVIAWNSNNLDSKVGGNYNYLYRLFRKSNLKPFERDISTE IYQAGSTPCNGVKGFNCYFPLQSYGFQPTYGVGYQPYRVVVLSFELLHAP ATVCGPKKSTNLVKNKCVNFNFNGLTGTGVLTESNKKFLPFQQFGRDIAD TTDAVRDPQTLEILDITPCSFGGVSVITPGTNTSNQVAVLYQGVNCTEVP V AIHADQLTPTWRVYSTGSNVFQTRAGCLIGAEHVNNSYECDIPIGAGICA S YQTQTNSPGSASSVASQSIIAYTMSLGVENSVAYSNNSIAIPTNFTISVT TEI LPVSMTKTSVDCTMYICGDSTECSNLLLQYGSFCTQLNRALTGIAVEQDK NTQEVFAQVKQIYKTPPIKDFGGFNFSQILPDPSKPSKRSPIEDLLFNKV TL ADAGFIKQYGDCLGDIAARDLICAQKFNGLTVLPPLLTDEMIAQYTSALL AGTITSGWTFGAGPALQIPFPMQMAYRFNGIGVTQNVLYENQKLIANQFN SAIGKIQDSLSSTPSALGKLQDVVNQNAQALNTLVKQLSSNFGAISSVLN D ILSRLDPPEAEVQIDRLITGRLQSLQTYVTQQLIRAAEIRASANLAATKM SE CVLGQSKRVDFCGKGYHLMSFPQSAPHGVVFLHVTYVPAQEKNFTTAPA ICHDGKAHFPREGVFVSNGTHWFVTQRNFYEPQIITTDNTFVSGNCDVVI G IVNNTVYDPLQSELDSIKEELDKIHKNGSGGSGDIIKLLNEQVNKEMQSS N LYMSMSSWCYTHSLDGAGLFLFDHAAEEYEHAKKLIIFLNENNVPVQLTS ISAPEHKFEGLTQIFQKAYEHEQHISESINNIVDHAIKSKDHATFNFLQW YV AEQHEEEVLFKDILDKIELIGNENHGLYLADQYVKGIAKSRKSGS | 248 |
| | | pCoV186-B.1.351/501Y.V2-L18F_D80A_D215_delta241243_R246I_K417N_E484K_N501Y_D614G_A701V | | SSQCVNFTTRTQLPPAYTNSFTRGVYYPDKVFRSSVLHSTQDLFLPFFSN V TWFHAIHVSGTNGTKRFANPVLPFNDGVYFASTEKSNIIRGWIFGTTLDS K TQSLLIVNNATNVVIKVCEFQFCNDPFLGVYYHKNNKSWMESEFRVYSSA NNCTFEYVSQPFLMDLEGKQGNFKNLREFVFKNIDGYFKIYSKHTPINLV R DLPQGFSALEPLVDLPIGINITRFQTLHISYLTPGDSSSGWTAGAAAYYV G YLQPRTFLLKYNENGTITDAVDCALDPLSETKCTLKSFTVEKGIYQTSNF R VQPTESIVRFPNITNLCPFGEVFNATRFASVYAWNRKRISNCVADYSVLY N SASFSTFKCYGVSPTKLNDLCFTNVYADSFVIRGDEVRQIAPGQTGNIAD Y NYKLPDDFTGCVIAWNSNNLDSKVGGNYNYLYRLFRKSNLKPFERDISTE IYQAGSTPCNGVKGFNCYFPLQSYGFQPTYGVGYQPYRVVVLSFELLHAP ATVCGPKKSTNLVKNKCVNFNFNGLTGTGVLTESNKKFLPFQQFGRDIAD TTDAVRDPQTLEILDITPCSFGGVSVITPGTNTSNQVAVLYQGVNCTEVP V AIHADQLTPTWRVYSTGSNVFQTRAGCLIGAEHVNNSYECDIPIGAGICA S YQTQTNSPGSASSVASQSIIAYTMSLGVENSVAYSNNSIAIPTNFTISVT TEI LPVSMTKTSVDCTMYICGDSTECSNLLLQYGSFCTQLNRALTGIAVEQDK NTQEVFAQVKQIYKTPPIKDFGGFNFSQILPDPSKPSKRSPIEDLLFNKV TL ADAGFIKQYGDCLGDIAARDLICAQKFNGLTVLPPLLTDEMIAQYTSALL AGTITSGWTFGAGPALQIPFPMQMAYRFNGIGVTQNVLYENQKLIANQFN SAIGKIQDSLSSTPSALGKLQDVVNQNAQALNTLVKQLSSNFGAISSVLN D ILSRLDPPEAEVQIDRLITGRLQSLQTYVTQQLIRAAEIRASANLAATKM SE CVLGQSKRVDFCGKGYHLMSFPQSAPHGVVFLHVTYVPAQEKNFTTAPA ICHDGKAHFPREGVFVSNGTHWFVTQRNFYEPQIITTDNTFVSGNCDVVI G IVNNTVYDPLQSELDSIKEELDKIHKNGSGGSGDIIKLLNEQVNKEMQSS N LYMSMSSWCYTHSLDGAGLFLFDHAAEEYEHAKKLIIFLNENNVPVQLTS ISAPEHKFEGLTQIFQKAYEHEQHISESINNIVDHAIKSKDHATFNFLQW YV AEQHEEEVLFKDILDKIELIGNENHGLYLADQYVKGIAKSRKSGS | 249 |
| | | pCoV186-B.1.351/501Y.V2-L18F_D80A_D215G_delta241-243_R246_K417N_E484K_N501Y_D614G_A701V | | SSQCVNFTTRTQLPPAYTNSFTRGVYYPDKVFRSSVLHSTQDLFLPFFSN V TWFHAIHVSGTNGTKRFANPVLPFNDGVYFASTEKSNIIRGWIFGTTLDS K TQSLLIVNNATNVVIKVCEFQFCNDPFLGVYYHKNNKSWMESEFRVYSSA NNCTFEYVSQPFLMDLEGKQGNFKNLREFVFKNIDGYFKIYSKHTPINLV R GLPQGFSALEPLVDLPIGINITRFQTLHRSYLTPGDSSSGWTAGAAAYYV G YLQPRTFLLKYNENGTITDAVDCALDPLSETKCTLKSFTVEKGIYQTSNF R VQPTESIVRFPNITNLCPFGEVFNATRFASVYAWNRKRISNCVADYSVLY N SASFSTFKCYGVSPTKLNDLCFTNVYADSFVIRGDEVRQIAPGQTGNIAD Y NYKLPDDFTGCVIAWNSNNLDSKVGGNYNYLYRLFRKSNLKPFERDISTE IYQAGSTPCNGVKGFNCYFPLQSYGFQPTYGVGYQPYRVVVLSFELLHAP ATVCGPKKSTNLVKNKCVNFNFNGLTGTGVLTESNKKFLPFQQFGRDIAD TTDAVRDPQTLEILDITPCSFGGVSVITPGTNTSNQVAVLYQGVNCTEVP V AIHADQLTPTWRVYSTGSNVFQTRAGCLIGAEHVNNSYECDIPIGAGICA S YQTQTNSPGSASSVASQSIIAYTMSLGVENSVAYSNNSIAIPTNFTISVT TEI LPVSMTKTSVDCTMYICGDSTECSNLLLQYGSFCTQLNRALTGIAVEQDK NTQEVFAQVKQIYKTPPIKDFGGFNFSQILPDPSKPSKRSPIEDLLFNKV TL ADAGFIKQYGDCLGDIAARDLICAQKFNGLTVLPPLLTDEMIAQYTSALL AGTITSGWTFGAGPALQIPFPMQMAYRFNGIGVTQNVLYENQKLIANQFN SAIGKIQDSLSSTPSALGKLQDVVNQNAQALNTLVKQLSSNFGAISSVLN D ILSRLDPPEAEVQIDRLITGRLQSLQTYVTQQLIRAAEIRASANLAATKM SE CVLGQSKRVDFCGKGYHLMSFPQSAPHGVVFLHVTYVPAQEKNFTTAPA ICHDGKAHFPREGVFVSNGTHWFVTQRNFYEPQIITTDNTFVSGNCDVVI G IVNNTVYDPLQSELDSIKEELDKIHKNGSGGSGDIIKLLNEQVNKEMQSS N LYMSMSSWCYTHSLDGAGLFLFDHAAEEYEHAKKLIIFLNENNVPVQLTS ISAPEHKFEGLTQIFQKAYEHEQHISESINNIVDHAIKSKDHATFNFLQW YV AEQHEEEVLFKDILDKIELIGNENHGLYLADQYVKGIAKSRKSGS | 250 |
| | | pCoV186-B.1.351/501Y.V2-L18F_D80_D215G_delta241-243_R246_K417N_E484K_N501Y_D614G_A701V | | SSQCVNFTTRTQLPPAYTNSFTRGVYYPDKVFRSSVLHSTQDLFLPFFSN V TWFHAIHVSGTNGTKRFDNPVLPFNDGVYFASTEKSNIIRGWIFGTTLDS K TQSLLIVNNATNVVIKVCEFQFCNDPFLGVYYHKNNKSWMESEFRVYSSA NNCTFEYVSQPFLMDLEGKQGNFKNLREFVFKNIDGYFKIYSKHTPINLV R GLPQGFSALEPLVDLPIGINITRFQTLHRSYLTPGDSSSGWTAGAAAYYV G YLQPRTFLLKYNENGTITDAVDCALDPLSETKCTLKSFTVEKGIYQTSNF R VQPTESIVRFPNITNLCPFGEVFNATRFASVYAWNRKRISNCVADYSVLY N SASFSTFKCYGVSPTKLNDLCFTNVYADSFVIRGDEVRQIAPGQTGNIAD Y NYKLPDDFTGCVIAWNSNNLDSKVGGNYNYLYRLFRKSNLKPFERDISTE IYQAGSTPCNGVKGFNCYFPLQSYGFQPTYGVGYQPYRVVVLSFELLHAP ATVCGPKKSTNLVKNKCVNFNFNGLTGTGVLTESNKKFLPFQQFGRDIAD TTDAVRDPQTLEILDITPCSFGGVSVITPGTNTSNQVAVLYQGVNCTEVP V AIHADQLTPTWRVYSTGSNVFQTRAGCLIGAEHVNNSYECDIPIGAGICA S YQTQTNSPGSASSVASQSIIAYTMSLGVENSVAYSNNSIAIPTNFTISVT TEI LPVSMTKTSVDCTMYICGDSTECSNLLLQYGSFCTQLNRALTGIAVEQDK NTQEVFAQVKQIYKTPPIKDFGGFNFSQILPDPSKPSKRSPIEDLLFNKV TL ADAGFIKQYGDCLGDIAARDLICAQKFNGLTVLPPLLTDEMIAQYTSALL AGTITSGWTFGAGPALQIPFPMQMAYRFNGIGVTQNVLYENQKLIANQFN SAIGKIQDSLSSTPSALGKLQDVVNQNAQALNTLVKQLSSNFGAISSVLN D ILSRLDPPEAEVQIDRLITGRLQSLQTYVTQQLIRAAEIRASANLAATKM SE CVLGQSKRVDFCGKGYHLMSFPQSAPHGVVFLHVTYVPAQEKNFTTAPA ICHDGKAHFPREGVFVSNGTHWFVTQRNFYEPQIITTDNTFVSGNCDVVI G IVNNTVYDPLQSELDSIKEELDKIHKNGSGGSGDIIKLLNEQVNKEMQSS N LYMSMSSWCYTHSLDGAGLFLFDHAAEEYEHAKKLIIFLNENNVPVQLTS ISAPEHKFEGLTQIFQKAYEHEQHISESINNIVDHAIKSKDHATFNFLQW YV AEQHEEEVLFKDILDKIELIGNENHGLYLADQYVKGIAKSRKSGS | 251 |
| | | pCoV186-B.1.351/501Y.V2-L18F_D80A_D215_delta241-243_R246_K417N_E484K_N501Y_D614G_A701V | | SSQCVNFTTRTQLPPAYTNSFTRGVYYPDKVFRSSVLHSTQDLFLPFFSN V TWFHAIHVSGTNGTKRFANPVLPFNDGVYFASTEKSNIIRGWIFGTTLDS K TQSLLIVNNATNVVIKVCEFQFCNDPFLGVYYHKNNKSWMESEFRVYSSA NNCTFEYVSQPFLMDLEGKQGNFKNLREFVFKNIDGYFKIYSKHTPINLV R DLPQGFSALEPLVDLPIGINITRFQTLHRSYLTPGDSSSGWTAGAAAYYV G YLQPRTFLLKYNENGTITDAVDCALDPLSETKCTLKSFTVEKGIYQTSNF R VQPTESIVRFPNITNLCPFGEVFNATRFASVYAWNRKRISNCVADYSVLY N SASFSTFKCYGVSPTKLNDLCFTNVYADSFVIRGDEVRQIAPGQTGNIAD Y NYKLPDDFTGCVIAWNSNNLDSKVGGNYNYLYRLFRKSNLKPFERDISTE IYQAGSTPCNGVKGFNCYFPLQSYGFQPTYGVGYQPYRVVVLSFELLHAP ATVCGPKKSTNLVKNKCVNFNFNGLTGTGVLTESNKKFLPFQQFGRDIAD TTDAVRDPQTLEILDITPCSFGGVSVITPGTNTSNQVAVLYQGVNCTEVP V AIHADQLTPTWRVYSTGSNVFQTRAGCLIGAEHVNNSYECDIPIGAGICA S YQTQTNSPGSASSVASQSIIAYTMSLGVENSVAYSNNSIAIPTNFTISVT TEI LPVSMTKTSVDCTMYICGDSTECSNLLLQYGSFCTQLNRALTGIAVEQDK NTQEVFAQVKQIYKTPPIKDFGGFNFSQILPDPSKPSKRSPIEDLLFNKV TL ADAGFIKQYGDCLGDIAARDLICAQKFNGLTVLPPLLTDEMIAQYTSALL AGTITSGWTFGAGPALQIPFPMQMAYRFNGIGVTQNVLYENQKLIANQFN SAIGKIQDSLSSTPSALGKLQDVVNQNAQALNTLVKQLSSNFGAISSVLN D ILSRLDPPEAEVQIDRLITGRLQSLQTYVTQQLIRAAEIRASANLAATKM SE CVLGQSKRVDFCGKGYHLMSFPQSAPHGVVFLHVTYVPAQEKNFTTAPA ICHDGKAHFPREGVFVSNGTHWFVTQRNFYEPQIITTDNTFVSGNCDVVI G IVNNTVYDPLQSELDSIKEELDKIHKNGSGGSGDIIKLLNEQVNKEMQSS N LYMSMSSWCYTHSLDGAGLFLFDHAAEEYEHAKKLIIFLNENNVPVQLTS ISAPEHKFEGLTQIFQKAYEHEQHISESINNIVDHAIKSKDHATFNFLQW YV AEQHEEEVLFKDILDKIELIGNENHGLYLADQYVKGIAKSRKSGS | 252 |
| | | pCoV186-P.1/501Y.V3-L18F_T20N_P26S_D138Y_R190S_K417T_E484K_N501Y_D614G_H655Y_T1027I | | SSQCVNFTNRTQLPSAYTNSFTRGVYYPDKVFRSSVLHSTQDLFLPFFSN V TWFHAIHVSGTNGTKRFDNPVLPFNDGVYFASTEKSNIIRGWIFGTTLDS K TQSLLIVNNATNVVIKVCEFQFCNYPFLGVYYHKNNKSWMESEFRVYSSA NNCTFEYVSQPFLMDLEGKQGNFKNLSEFVFKNIDGYFKIYSKHTPINLV R DLPQGFSALEPLVDLPIGINITRFQTLLALHRSYLTPGDSSSGWTAGAAA Y YVGYLQPRTFLLKYNENGTITDAVDCALDPLSETKCTLKSFTVEKGIYQT S NFRVQPTESIVRFPNITNLCPFGEVFNATRFASVYAWNRKRISNCVADYS V LYNSASFSTFKCYGVSPTKLNDLCFTNVYADSFVIRGDEVRQIAPGQTGT I ADYNYKLPDDFTGCVIAWNSNNLDSKVGGNYNYLYRLFRKSNLKPFERD ISTEIYQAGSTPCNGVKGFNCYFPLQSYGFQPTYGVGYQPYRVVVLSFEL L HAPATVCGPKKSTNLVKNKCVNFNFNGLTGTGVLTESNKKFLPFQQFGR DIADTTDAVRDPQTLEILDITPCSFGGVSVITPGTNTSNQVAVLYQGVNC T EVPVAIHADQLTPTWRVYSTGSNVFQTRAGCLIGAEYVNNSYECDIPIGA GICASYQTQTNSPGSASSVASQSIIAYTMSLGAENSVAYSNNSIAIPTNF TIS VTTEILPVSMTKTSVDCTMYICGDSTECSNLLLQYGSFCTQLNRALTGIA V EQDKNTQEVFAQVKQIYKTPPIKDFGGFNFSQILPDPSKPSKRSPIEDLL FN KVTLADAGFIKQYGDCLGDIAARDLICAQKFNGLTVLPPLLTDEMIAQYT SALLAGTITSGWTFGAGPALQIPFPMQMAYRFNGIGVTQNVLYENQKLIA NQFNSAIGKIQDSLSSTPSALGKLQDVVNQNAQALNTLVKQLSSNFGAIS S VLNDILSRLDPPEAEVQIDRLITGRLQSLQTYVTQQLIRAAEIRASANLA AI KMSECVLGQSKRVDFCGKGYHLMSFPQSAPHGVVFLHVTYVPAQEKNFT TAPAICHDGKAHFPREGVFVSNGTHWFVTQRNFYEPQIITTDNTFVSGNC DVVIGIVNNTVYDPLQSELDSIKEELDKIHKNGSGGSGDIIKLLNEQVNK E MQSSNLYMSMSSWCYTHSLDGAGLFLFDHAAEEYEHAKKLIIFLNENNV PVQLTSISAPEHKFEGLTQIFQKAYEHEQHISESINNIVDHAIKSKDHAT FNF LQWYVAEQHEEEVLFKDILDKIELIGNENHGLYLADQYVKGIAKSRKSGS | 253 |
| | | pCoV1B-08-N1158glycan-N1172glycan | | SSQCVNLTTRTQLPPAYTNSFTRGVYYPDKVFRSSVLHSTQDLFLPFFSN V TWFHAIHVSGTNGTKRFDNPVLPFNDGVYFASTEKSNIIRGWIFGTTLDS K TQSLLIVNNATNVVIKVCEFQFCNDPFLGVYYHKNNKSWMESEFRVYSSA NNCTFEYVSQPFLMDLEGKQGNFKNLREFVFKNIDGYFKIYSKHTPINLV R DLPQGFSALEPLVDLPIGINITRFQTLLALHRSYLTPGDSSSGWTAGAAA Y YVGYLQPRTFLLKYNENGTITDAVDCALDPLSETKCTLKSFTVEKGIYQT S NFRVQPTESIVRFPNITNLCPFGEVFNATRFASVYAWNRKRISNCVADYS V LYNSASFSTFKCYGVSPTKLNDLCFTNVYADSFVIRGDEVRQIAPGQTGK I ADYNYKLPDDFTGCVIAWNSNNLDSKVGGNYNYLYRLFRKSNLKPFERD ISTEIYQAGSTPCNGVEGFNCYFPLQSYGFQPTNGVGYQPYRVVVLSFEL L HAPATVCGPKKSTNLVKNKCVNFNFNGLTGTGVLTESNKKFLPFQQFGR DIADTTDAVRDPQTLEILDITPCSFGGVSVITPGTNTSNQVAVLYQDVNC T EVPVAIHADQLTPTWRVYSTGSNVFQTRAGCLIGAEHVNNSYECDIPIGA GICASYQTQTNSPGSASSVASQSIIAYTMSLGAENSVAYSNNSIAIPTNF TIS VTTEILPVSMTKTSVDCTMYICGDSTECSNLLLQYGSFCTQLNRALTGIA V EQDKNTQEVFAQVKQIYKTPPIKDFGGFNFSQILPDPSKPSKRSFIEDLL FN KVTLADAGFIKQYGDCLGDIAARDLICAQKFNGLTVLPPLLTDEMIAQYT SALLAGTITSGWTFGAGAALQIPFAMQMAYRFNGIGVTQNVLYENQKLIA NQFNSAIGKIQDSLSSTASALGKLQDVVNQNAQALNTLVKQLSSNFGAIS S VLNDILSRLDPPEAEVQIDRLITGRLQSLQTYVTQQLIRAAEIRASANLA AT KMSECVLGQSKRVDFCGKGYHLMSFPQSAPHGVVFLHVTYVPAQEKNFT TAPAICHDGKAHFPREGVFVSNGTHWFVTQRNFYEPQIITTDNTFVSGNC DVVIGIVNNTVYDPLQSELDSIKEELDKIHKNLTSIKEELDKIHKNGSGG SG DIIKLLNEQVNKEMQSSNLYMSMSSWCYTHSLDGAGLFLFDHAAEEYEH AKKLIIFLNENNVPVQLTSISAPEHKFEGLTQIFQKAYEHEQHISESINN IVD HAIKSKDHATFNFLQWYVAEQHEEEVLFKDILDKIELIGNENHGLYLADQ YVKGIAKSRKSGS | 254 |
| | | pCoVS01 | | SDLDRCTTFDDVQAPNYTQHTSSMRGVYYPDEIFRSDTLYLTQDLFLPFY SNVTGFHTINHTFGNPVIPFKDGIYFAATEKSNVVRGWVFGSTMNNKSQS VIIINNSTNVVIRACNFELCDNPFFAVSKPMGTQTHTMIFDNAFNCTFEY IS DAFSLDVSEKSGNFKHLREFVFKNKDGFLYVYKGYQPIDVVRDLPSGFNT LKPIFKLPLGINITNFRAILTAFSPAQDIWGTSAAAYFVGYLKPTTFMLK YD ENGTITDAVDCSQNPLAELKCSVKSFEIDKGIYQTSNFRVVPSGDVVRFP N ITNLCPFGEVFNATKFPSVYAWERKKISNCVADYSVLYNSTFFSTFKCYG V SATKLNDLCFSNVYADSFVVKGDDVRQIAPGQTGVIADYNYKLPDDFMG CVLAWNTRNIDATSTGNYNYKYRYLRHGKLRPFERDISNVPFSPDGKPCT PPALNCYWPLNDYGFYTTTGIGYQPYRVVVLSFELLNAPATVCGPKLSTD LIKNQCVNFNFNGLTGTGVLTPSSKRFQPFQQFGRDVSDFTDSVRDPKTS E ILDISPCAFGGVSVITPGTNASSEVAVLYQDVNCTDVSTAIHADQLTPAW R IYSTGNNVFQTQAGCLIGAEHVDTSYECDIPIGAGICASYHTVSLLRSTS QK SIVAYTMSLGADSSIAYSNNTIAIPTNFSISITTEVMPVSMAKTSVDCNM YI CGDSTECANLLLQYGSFCTQLNRALSGIAAEQDRNTREVFAQVKQMYKT PTLKYFGGFNFSQILPDPLKPTKRSFIEDLLFNKVTLADAGFMKQYGECL G DINARDLICAQKFNGLTVLPPLLTDDMIAAYTAALVSGTATAGWTFGAGA ALQIPFAMQMAYRFNGIGVTQNVLYENQKQIANQFNKAISQIQESLTTTS T ALGKLQDVVNQNAQALNTLVKQLSSNFGAISSVLNDILSRLDPPEAEVQI DRLITGRLQSLQTYVTQQLIRAAEIRASANLAATKMSECVLGQSKRVDFC GKGYHLMSFPQAAPHGVVFLHVTYVPSQERNFTTAPAICHEGKAYFPREG VFVFNGTSWFITQRNFFSPQIITTDNTFVSGNCDVVIGIINNTVYDPLQS EL DSIKEELDKIHKNGSGGSGDIIKLLNEQVNKEMQSSNLYMSMSSWCYTHS LDGAGLFLFDHAAEEYEHAKKLIIFLNENNVPVQLTSISAPEHKFEGLTQ IF QKAYEHEQHISESINNIVDHAIKSKDHATFNFLQWYVAEQHEEEVLFKDI L DKIELIGNENHGLYLADQYVKGIAKSRKSGS | 255 |
| | | OC43-1b06v0-natlead | | AVIGDLKCTSDNINDKDTGPPPISTDTVDVTNGLGTYYVLDRVYLNTTLF L NGYYPTSGSTYRNMALKGSVLLSRLWFKPPFLSDFINGIFAKVKNTKVIK DRVMYSEFPAITIGSTFVNTSYSVVVQPRTINSTQDGDNKLQGLLEVSVC Q YNMCEYPQTICHPNLGNHRKELWHLDTGVVSCLYKRNFTYDVNADYLY FHFYQEGGTFYAYFTDTGVVTKFLFNVYLGMALSHYYVMPLTCNSKLTL EYWVTPLTSRQYLLAFNQDGIIFNAVDCMSDFMSEIKCKTQSIAPPTGVY E LNGYTVQPIADVYRRKPNLPNCNIEAWLNDKSVPSPLNWERKTFSNCNFN MSSLMSFIQADSFTCNNIDAAKIYGMCFSSITIDKFAIPNGRKVDLQLGN L GYLQSFNYRIDTTATSCQLYYNLPAANVSVSRFNPSTWNKRFGFIEDSVF K PRPAGVLTNHDVVYAQHCFKAPKNFCPCKLNGSCVGSGPGKNNGIGTCP AGTNYLTCDNLCTPDPITFTGTYKCPQTKSLVGIGEHCSGLAVKSDYCGG NSCTCRPQAFLGWSADSCLQGDKCNIFANFILHDVNSGLTCSTDLQKANT DIILGVCVNYDLYGILGQGIFVEVNATYYNSWQNLLYDSNGNLYGFRDYI TNRTFMIRSCYSGRVSAAFHANSSEPALLFRNIKCNYVFNNSLTRQLQPI N YFDSYLGCVVNAYNSTAISVQTCDLTVGSGYCVDYSKNGGSGGAITTGY RFTNFEPFTVNSVNDSLEPVGGLYEIQIPSEFTIGNMVEFIQTSSPKVTI DCA AFVCGDYAACKSQLVEYGSFCDNINAILTEVNELLDTTQLQVANSLMNG VTLSTKLKDGVNFNVDDINFSPVLGCLGSECSKASSRSAIEDLLFDKVKL S DVGFVEAYNNCTGGAEIRDLICVQSYKGIKVLPPLLSENQFSGYTLAATS A SLFPPWTAAAGVPFYLNVQYRINGLGVTMDVLSQNQKLIANAFNNALYA IQEGFDATNSALVKIQAVVNANAEALNNLLQQLSNRFGAISASLQEILSR L DPPEAEAQIDRLINGRLTALNAYVSQQLSDSTLVKFSAAQAMEKVNECVK SQSSRINFCGNGNHIISLVQNAPYGLYFIHFSYVPTKYVTARVSPGLCIA GD RGIAPKSGYFVNVNNTWMYTGSGYYYPEPITENNVVVMSTCAVNYTKAP YVMLNTSISELQDFKEELDQWHKNGSGGSGDIIKLLNEQVNKEMQSSNLY MSMSSWCYTHSLDGAGLFLFDHAAEEYEHAKKLIIFLNENNVPVQLTSIS APEHKFEGLTQIFQKAYEHEQHISESINNIVDHAIKSKDHATFNFLQWYV A EQHEEEVLFKDILDKIELIGNENHGLYLADQYVKGIAKSRKSGS | 256 |
| | | OC43-1b06v0-nogly-natlead | | AVIGDLKCTSDNINDKDTGPPPISTDTVDVTNGLGTYYVLDRVYLNTTLF L NGYYPTSGSTYRNMALKGSVLLSRLWFKPPFLSDFINGIFAKVKNTKVIK DRVMYSEFPAITIGSTFVNTSYSVVVQPRTINSTQDGDNKLQGLLEVSVC Q YNMCEYPQTICHPNLGNHRKELWHLDTGVVSCLYKRNFTYDVNADYLY FHFYQEGGTFYAYFTDTGVVTKFLFNVYLGMALSHYYVMPLTCNSKLTL EYWVTPLTSRQYLLAFNQDGIIFNAVDCMSDFMSEIKCKTQSIAPPTGVY E LNGYTVQPIADVYRRKPNLPNCNIEAWLNDKSVPSPLNWERKTFSNCNFN MSSLMSFIQADSFTCNNIDAAKIYGMCFSSITIDKFAIPNGRKVDLQLGN L GYLQSFNYRIDTTATSCQLYYNLPAANVSVSRFNPSTWNKRFGFIEDSVF K PRPAGVLTNHDVVYAQHCFKAPKNFCPCKLNGSCVGSGPGKNNGIGTCP AGTNYLTCDNLCTPDPITFTGTYKCPQTKSLVGIGEHCSGLAVKSDYCGG NSCTCRPQAFLGWSADSCLQGDKCNIFANFILHDVNSGLTCSTDLQKANT DIILGVCVNYDLYGILGQGIFVEVNATYYNSWQNLLYDSNGNLYGFRDYI TNRTFMIRSCYSGRVSAAFHANSSEPALLFRNIKCNYVFNNSLTRQLQPI N YFDSYLGCVVNAYNSTAISVQTCDLTVGSGYCVDYSKNGGSGGAITTGY RFTNFEPFTVNSVNDSLEPVGGLYEIQIPSEFTIGNMVEFIQTSSPKVTI DCA AFVCGDYAACKSQLVEYGSFCDNINAILTEVNELLDTTQLQVANSLMNG VTLSTKLKDGVNFNVDDINFSPVLGCLGSECSKASSRSAIEDLLFDKVKL S DVGFVEAYNNCTGGAEIRDLICVQSYKGIKVLPPLLSENQFSGYTLAATS A SLFPPWTAAAGVPFYLNVQYRINGLGVTMDVLSQNQKLIANAFNNALYA IQEGFDATNSALVKIQAVVNANAEALNNLLQQLSNRFGAISASLQEILSR L DPPEAEAQIDRLINGRLTALNAYVSQQLSDSTLVKFSAAQAMEKVNECVK SQSSRINFCGNGNHIISLVQNAPYGLYFIHFSYVPTKYVTARVSPGLCIA GD RGIAPKSGYFVNVNNTWMYTGSGYYYPEPITENNVVVMSTCAVNYTKAP YVMLNTSISELQDFKEELDQWHKQGSGGSGDIIKLLNEQVNKEMQSSNLY MSMSSWCYTHSLDGAGLFLFDHAAEEYEHAKKLIIFLNENNVPVQLTSIS APEHKFEGLTQIFQKAYEHEQHISESINNIVDHAIKSKDHATFNFLQWYV A EQHEEEVLFKDILDKIELIGNENHGLYLADQYVKGIAKSRKSGS | 257 |
| | | OC43-1b06v1-natlead | | AVIGDLKCTSDNINDKDTGPPPISTDTVDVTNGLGTYYVLDRVYLNTTLF L NGYYPTSGSTYRNMALKGSVLLSRLWFKPPFLSDFINGIFAKVKNTKVIK DRVMYSEFPAITIGSTFVNTSYSVVVQPRTINSTQDGDNKLQGLLEVSVC Q YNMCEYPQTICHPNLGNHRKELWHLDTGVVSCLYKRNFTYDVNADYLY FHFYQEGGTFYAYFTDTGVVTKFLFNVYLGMALSHYYVMPLTCNSKLTL EYWVTPLTSRQYLLAFNQDGIIFNAVDCMSDFMSEIKCKTQSIAPPTGVY E LNGYTVQPIADVYRRKPNLPNCNIEAWLNDKSVPSPLNWERKTFSNCNFN MSSLMSFIQADSFTCNNIDAAKIYGMCFSSITIDKFAIPNGRKVDLQLGN L GYLQSFNYRIDTTATSCQLYYNLPAANVSVSRFNPSTWNKRFGFIEDSVF K PRPAGVLTNHDVVYAQHCFKAPKNFCPCKLNGSCVGSGPGKNNGIGTCP AGTNYLTCDNLCTPDPITFTGTYKCPQTKSLVGIGEHCSGLAVKSDYCGG NSCTCRPQAFLGWSADSCLQGDKCNIFANFILHDVNSGLTCSTDLQKANT DIILGVCVNYDLYGILGQGIFVEVNATYYNSWQNLLYDSNGNLYGFRDYI TNRTFMIRSCYSGRVSAAFHANSSEPALLFRNIKCNYVFNNSLTRQLQPI N YFDSYLGCVVNAYNSTAISVQTCDLTVGSGYCVDYSKNGGSGGAITTGY RFTNFEPFTVNSVNDSLEPVGGLYEIQIPSEFTIGNMVEFIQTSSPKVTI DCA AFVCGDYAACKSQLVEYGSFCDNINAILTEVNELLDTTQLQVANSLMNG VTLSTKLKDGVNFNVDDINFSPVLGCLGSECSKASSRSAIEDLLFDKVKL S DVGFVEAYNNCTGGAEIRDLICVQSYKGIKVLPPLLSENQFSGYTLAATS A SLFPPWTAAAGVPFYLNVQYRINGLGVTMDVLSQNQKLIANAFNNALYA IQEGFDATNSALVKIQAVVNANAEALNNLLQQLSNRFGAISASLQEILSR L DPPEAEAQIDRLINGRLTALNAYVSQQLSDSTLVKFSAAQAMEKVNECVK SQSSRINFCGNGNHIISLVQNAPYGLYFIHFSYVPTKYVTARVSPGLCIA GD RGIAPKSGYFVNVNNTWMYTGSGYYYPEPITENNVVVMSTCAVNYTKAP YVMLNTLQSNLQDIKEELDQIHKNGSGGSGDIIKLLNEQVNKEMQSSNLY MSMSSWCYTHSLDGAGLFLFDHAAEEYEHAKKLIIFLNENNVPVQLTSIS APEHKFEGLTQIFQKAYEHEQHISESINNIVDHAIKSKDHATFNFLQWYV A EQHEEEVLFKDILDKIELIGNENHGLYLADQYVKGIAKSRKSGS | 258 |
| | | OC43-1b06v1-nogly-natlead | | AVIGDLKCTSDNINDKDTGPPPISTDTVDVTNGLGTYYVLDRVYLNTTLF L NGYYPTSGSTYRNMALKGSVLLSRLWFKPPFLSDFINGIFAKVKNTKVIK DRVMYSEFPAITIGSTFVNTSYSVVVQPRTINSTQDGDNKLQGLLEVSVC Q YNMCEYPQTICHPNLGNHRKELWHLDTGVVSCLYKRNFTYDVNADYLY FHFYQEGGTFYAYFTDTGVVTKFLFNVYLGMALSHYYVMPLTCNSKLTL EYWVTPLTSRQYLLAFNQDGIIFNAVDCMSDFMSEIKCKTQSIAPPTGVY E LNGYTVQPIADVYRRKPNLPNCNIEAWLNDKSVPSPLNWERKTFSNCNFN MSSLMSFIQADSFTCNNIDAAKIYGMCFSSITIDKFAIPNGRKVDLQLGN L GYLQSFNYRIDTTATSCQLYYNLPAANVSVSRFNPSTWNKRFGFIEDSVF K PRPAGVLTNHDVVYAQHCFKAPKNFCPCKLNGSCVGSGPGKNNGIGTCP AGTNYLTCDNLCTPDPITFTGTYKCPQTKSLVGIGEHCSGLAVKSDYCGG NSCTCRPQAFLGWSADSCLQGDKCNIFANFILHDVNSGLTCSTDLQKANT DIILGVCVNYDLYGILGQGIFVEVNATYYNSWQNLLYDSNGNLYGFRDYI TNRTFMIRSCYSGRVSAAFHANSSEPALLFRNIKCNYVFNNSLTRQLQPI N YFDSYLGCVVNAYNSTAISVQTCDLTVGSGYCVDYSKNGGSGGAITTGY RFTNFEPFTVNSVNDSLEPVGGLYEIQIPSEFTIGNMVEFIQTSSPKVTI DCA AFVCGDYAACKSQLVEYGSFCDNINAILTEVNELLDTTQLQVANSLMNG VTLSTKLKDGVNFNVDDINFSPVLGCLGSECSKASSRSAIEDLLFDKVKL S DVGFVEAYNNCTGGAEIRDLICVQSYKGIKVLPPLLSENQFSGYTLAATS A SLFPPWTAAAGVPFYLNVQYRINGLGVTMDVLSQNQKLIANAFNNALYA IQEGFDATNSALVKIQAVVNANAEALNNLLQQLSNRFGAISASLQEILSR L DPPEAEAQIDRLINGRLTALNAYVSQQLSDSTLVKFSAAQAMEKVNECVK SQSSRINFCGNGNHIISLVQNAPYGLYFIHFSYVPTKYVTARVSPGLCIA GD RGIAPKSGYFVNVNNTWMYTGSGYYYPEPITENNVVVMSTCAVNYTKAP YVMLNTLQSNLQDIKEELDQIHKQGSGGSGDIIKLLNEQVNKEMQSSNLY MSMSSWCYTHSLDGAGLFLFDHAAEEYEHAKKLIIFLNENNVPVQLTSIS APEHKFEGLTQIFQKAYEHEQHISESINNIVDHAIKSKDHATFNFLQWYV A EQHEEEVLFKDILDKIELIGNENHGLYLADQYVKGIAKSRKSGS | 259 |
| | | OC43-1b06v2-natlead | | AVIGDLKCTSDNINDKDTGPPPISTDTVDVTNGLGTYYVLDRVYLNTTLF L NGYYPTSGSTYRNMALKGSVLLSRLWFKPPFLSDFINGIFAKVKNTKVIK DRVMYSEFPAITIGSTFVNTSYSVVVQPRTINSTQDGDNKLQGLLEVSVC Q YNMCEYPQTICHPNLGNHRKELWHLDTGVVSCLYKRNFTYDVNADYLY FHFYQEGGTFYAYFTDTGVVTKFLFNVYLGMALSHYYVMPLTCNSKLTL EYWVTPLTSRQYLLAFNQDGIIFNAVDCMSDFMSEIKCKTQSIAPPTGVY E LNGYTVQPIADVYRRKPNLPNCNIEAWLNDKSVPSPLNWERKTFSNCNFN MSSLMSFIQADSFTCNNIDAAKIYGMCFSSITIDKFAIPNGRKVDLQLGN L GYLQSFNYRIDTTATSCQLYYNLPAANVSVSRFNPSTWNKRFGFIEDSVF K PRPAGVLTNHDVVYAQHCFKAPKNFCPCKLNGSCVGSGPGKNNGIGTCP AGTNYLTCDNLCTPDPITFTGTYKCPQTKSLVGIGEHCSGLAVKSDYCGG NSCTCRPQAFLGWSADSCLQGDKCNIFANFILHDVNSGLTCSTDLQKANT DIILGVCVNYDLYGILGQGIFVEVNATYYNSWQNLLYDSNGNLYGFRDYI TNRTFMIRSCYSGRVSAAFHANSSEPALLFRNIKCNYVFNNSLTRQLQPI N YFDSYLGCVVNAYNSTAISVQTCDLTVGSGYCVDYSKNGGSGGAITTGY RFTNFEPFTVNSVNDSLEPVGGLYEIQIPSEFTIGNMVEFIQTSSPKVTI DCA AFVCGDYAACKSQLVEYGSFCDNINAILTEVNELLDTTQLQVANSLMNG VTLSTKLKDGVNFNVDDINFSPVLGCLGSECSKASSRSAIEDLLFDKVKL S DVGFVEAYNNCTGGAEIRDLICVQSYKGIKVLPPLLSENQFSGYTLAATS A SLFPPWTAAAGVPFYLNVQYRINGLGVTMDVLSQNQKLIANAFNNALYA IQEGFDATNSALVKIQAVVNANAEALNNLLQQLSNRFGAISASLQEILSR L DPPEAEAQIDRLINGRLTALNAYVSQQLSDSTLVKFSAAQAMEKVNECVK SQSSRINFCGNGNHIISLVQNAPYGLYFIHFSYVPTKYVTARVSPGLCIA GD RGIAPKSGYFVNVNNTWMYTGSGYYYPEPITENNVVVMSTCAVNYTKAP YVMLNTLQSNLQDLKEELDQLHKNGSGGSGDIIKLLNEQVNKEMQSSNL YMSMSSWCYTHSLDGAGLFLFDHAAEEYEHAKKLIIFLNENNVPVQLTSI SAPEHKFEGLTQIFQKAYEHEQHISESINNIVDHAIKSKDHATFNFLQWY V AEQHEEEVLFKDILDKIELIGNENHGLYLADQYVKGIAKSRKSGS | 260 |
| | | OC43-1b06v2-nogly-natlead | | AVIGDLKCTSDNINDKDTGPPPISTDTVDVTNGLGTYYVLDRVYLNTTLF L NGYYPTSGSTYRNMALKGSVLLSRLWFKPPFLSDFINGIFAKVKNTKVIK DRVMYSEFPAITIGSTFVNTSYSVVVQPRTINSTQDGDNKLQGLLEVSVC Q YNMCEYPQTICHPNLGNHRKELWHLDTGVVSCLYKRNFTYDVNADYLY FHFYQEGGTFYAYFTDTGVVTKFLFNVYLGMALSHYYVMPLTCNSKLTL EYWVTPLTSRQYLLAFNQDGIIFNAVDCMSDFMSEIKCKTQSIAPPTGVY E LNGYTVQPIADVYRRKPNLPNCNIEAWLNDKSVPSPLNWERKTFSNCNFN MSSLMSFIQADSFTCNNIDAAKIYGMCFSSITIDKFAIPNGRKVDLQLGN L GYLQSFNYRIDTTATSCQLYYNLPAANVSVSRFNPSTWNKRFGFIEDSVF K PRPAGVLTNHDVVYAQHCFKAPKNFCPCKLNGSCVGSGPGKNNGIGTCP AGTNYLTCDNLCTPDPITFTGTYKCPQTKSLVGIGEHCSGLAVKSDYCGG NSCTCRPQAFLGWSADSCLQGDKCNIFANFILHDVNSGLTCSTDLQKANT DIILGVCVNYDLYGILGQGIFVEVNATYYNSWQNLLYDSNGNLYGFRDYI TNRTFMIRSCYSGRVSAAFHANSSEPALLFRNIKCNYVFNNSLTRQLQPI N YFDSYLGCVVNAYNSTAISVQTCDLTVGSGYCVDYSKNGGSGGAITTGY RFTNFEPFTVNSVNDSLEPVGGLYEIQIPSEFTIGNMVEFIQTSSPKVTI DCA AFVCGDYAACKSQLVEYGSFCDNINAILTEVNELLDTTQLQVANSLMNG VTLSTKLKDGVNFNVDDINFSPVLGCLGSECSKASSRSAIEDLLFDKVKL S DVGFVEAYNNCTGGAEIRDLICVQSYKGIKVLPPLLSENQFSGYTLAATS A SLFPPWTAAAGVPFYLNVQYRINGLGVTMDVLSQNQKLIANAFNNALYA IQEGFDATNSALVKIQAVVNANAEALNNLLQQLSNRFGAISASLQEILSR L DPPEAEAQIDRLINGRLTALNAYVSQQLSDSTLVKFSAAQAMEKVNECVK SQSSRINFCGNGNHIISLVQNAPYGLYFIHFSYVPTKYVTARVSPGLCIA GD RGIAPKSGYFVNVNNTWMYTGSGYYYPEPITENNVVVMSTCAVNYTKAP YVMLNTLQSNLQDLKEELDQLHKQGSGGSGDIIKLLNEQVNKEMQSSNL YMSMSSWCYTHSLDGAGLFLFDHAAEEYEHAKKLIIFLNENNVPVQLTSI SAPEHKFEGLTQIFQKAYEHEQHISESINNIVDHAIKSKDHATFNFLQWY V AEQHEEEVLFKDILDKIELIGNENHGLYLADQYVKGIAKSRKSGS | 261 |
| | | OC43-1b06v3-nogly-natlead | | AVIGDLKCTSDNINDKDTGPPPISTDTVDVTNGLGTYYVLDRVYLNTTLF L NGYYPTSGSTYRNMALKGSVLLSRLWFKPPFLSDFINGIFAKVKNTKVIK DRVMYSEFPAITIGSTFVNTSYSVVVQPRTINSTQDGDNKLQGLLEVSVC Q YNMCEYPQTICHPNLGNHRKELWHLDTGVVSCLYKRNFTYDVNADYLY FHFYQEGGTFYAYFTDTGVVTKFLFNVYLGMALSHYYVMPLTCNSKLTL EYWVTPLTSRQYLLAFNQDGIIFNAVDCMSDFMSEIKCKTQSIAPPTGVY E LNGYTVQPIADVYRRKPNLPNCNIEAWLNDKSVPSPLNWERKTFSNCNFN MSSLMSFIQADSFTCNNIDAAKIYGMCFSSITIDKFAIPNGRKVDLQLGN L GYLQSFNYRIDTTATSCQLYYNLPAANVSVSRFNPSTWNKRFGFIEDSVF K PRPAGVLTNHDVVYAQHCFKAPKNFCPCKLNGSCVGSGPGKNNGIGTCP AGTNYLTCDNLCTPDPITFTGTYKCPQTKSLVGIGEHCSGLAVKSDYCGG NSCTCRPQAFLGWSADSCLQGDKCNIFANFILHDVNSGLTCSTDLQKANT DIILGVCVNYDLYGILGQGIFVEVNATYYNSWQNLLYDSNGNLYGFRDYI TNRTFMIRSCYSGRVSAAFHANSSEPALLFRNIKCNYVFNNSLTRQLQPI N YFDSYLGCVVNAYNSTAISVQTCDLTVGSGYCVDYSKNGGSGGAITTGY RFTNFEPFTVNSVNDSLEPVGGLYEIQIPSEFTIGNMVEFIQTSSPKVTI DCA AFVCGDYAACKSQLVEYGSFCDNINAILTEVNELLDTTQLQVANSLMNG VTLSTKLKDGVNFNVDDINFSPVLGCLGSECSKASSRSAIEDLLFDKVKL S DVGFVEAYNNCTGGAEIRDLICVQSYKGIKVLPPLLSENQFSGYTLAATS A SLFPPWTAAAGVPFYLNVQYRINGLGVTMDVLSQNQKLIANAFNNALYA IQEGFDATNSALVKIQAVVNANAEALNNLLQQLSNRFGAISASLQEILSR L DPPEAEAQIDRLINGRLTALNAYVSQQLSDSTLVKFSAAQAMEKVNECVK SQSSRINFCGNGNHIISLVQNAPYGLYFIHFSYVPTKYVTARVSPGLCIA GD RGIAPKSGYFVNVNNTWMYTGSGYYYPEPITENNVVVMSTCAVNYTKAP YVMLNTSISELQDIKEELDQIHKQGSGGSGDIIKLLNEQVNKEMQSSNLY M SMSSWCYTHSLDGAGLFLFDHAAEEYEHAKKLIIFLNENNVPVQLTSISA P EHKFEGLTQIFQKAYEHEQHISESINNIVDHAIKSKDHATFNFLQWYVAE Q HEEEVLFKDILDKIELIGNENHGLYLADQYVKGIAKSRKSGS | 262 |
| | | OC43-1b06v4-nogly-natlead | | AVIGDLKCTSDNINDKDTGPPPISTDTVDVTNGLGTYYVLDRVYLNTTLF L NGYYPTSGSTYRNMALKGSVLLSRLWFKPPFLSDFINGIFAKVKNTKVIK DRVMYSEFPAITIGSTFVNTSYSVVVQPRTINSTQDGDNKLQGLLEVSVC Q YNMCEYPQTICHPNLGNHRKELWHLDTGVVSCLYKRNFTYDVNADYLY FHFYQEGGTFYAYFTDTGVVTKFLFNVYLGMALSHYYVMPLTCNSKLTL EYWVTPLTSRQYLLAFNQDGIIFNAVDCMSDFMSEIKCKTQSIAPPTGVY E LNGYTVQPIADVYRRKPNLPNCNIEAWLNDKSVPSPLNWERKTFSNCNFN MSSLMSFIQADSFTCNNIDAAKIYGMCFSSITIDKFAIPNGRKVDLQLGN L GYLQSFNYRIDTTATSCQLYYNLPAANVSVSRFNPSTWNKRFGFIEDSVF K PRPAGVLTNHDVVYAQHCFKAPKNFCPCKLNGSCVGSGPGKNNGIGTCP AGTNYLTCDNLCTPDPITFTGTYKCPQTKSLVGIGEHCSGLAVKSDYCGG NSCTCRPQAFLGWSADSCLQGDKCNIFANFILHDVNSGLTCSTDLQKANT DIILGVCVNYDLYGILGQGIFVEVNATYYNSWQNLLYDSNGNLYGFRDYI TNRTFMIRSCYSGRVSAAFHANSSEPALLFRNIKCNYVFNNSLTRQLQPI N YFDSYLGCVVNAYNSTAISVQTCDLTVGSGYCVDYSKNGGSGGAITTGY RFTNFEPFTVNSVNDSLEPVGGLYEIQIPSEFTIGNMVEFIQTSSPKVTI DCA AFVCGDYAACKSQLVEYGSFCDNINAILTEVNELLDTTQLQVANSLMNG VTLSTKLKDGVNFNVDDINFSPVLGCLGSECSKASSRSAIEDLLFDKVKL S DVGFVEAYNNCTGGAEIRDLICVQSYKGIKVLPPLLSENQFSGYTLAATS A SLFPPWTAAAGVPFYLNVQYRINGLGVTMDVLSQNQKLIANAFNNALYA IQEGFDATNSALVKIQAVVNANAEALNNLLQQLSNRFGAISASLQEILSR L DPPEAEAQIDRLINGRLTALNAYVSQQLSDSTLVKFSAAQAMEKVNECVK SQSSRINFCGNGNHIISLVQNAPYGLYFIHFSYVPTKYVTARVSPGLCIA GD RGIAPKSGYFVNVNNTWMYTGSGYYYPEPITENNVVVMSTCAVNYTKAP YVMLNTSISELQDLKEELDQLHKQGSGGSGDIIKLLNEQVNKEMQSSNLY MSMSSWCYTHSLDGAGLFLFDHAAEEYEHAKKLIIFLNENNVPVQLTSIS APEHKFEGLTQIFQKAYEHEQHISESINNIVDHAIKSKDHATFNFLQWYV A EQHEEEVLFKDILDKIELIGNENHGLYLADQYVKGIAKSRKSGS | 263 |
| | | 229E-1b06-v0-natlead | | CQTTNGLNTSYSVCNGCVGYSENVFAVESGGYIPSDFAFNNWFLLTNTSS VVDGVVRSFQPLLLNCLWSVSGLRFTTGFVYFNGTGRGDCKGFSSDVLS DVIRYNLNFEENLRRGTILFKTSYGVVVFYCTNNTLVSGDAHIPFGTVLG N FYCFVNTTIGNETTSAFVGALPKTVREFVISRTGHFYINGYRYFTLGNVE A VNFNVTTAETTDFCTVALASYADVLVNVSQTSIANIIYCNSVINRLRCDQ L SFDVPDGFYSTSPIQSVELPVSIVSLPVYHKHTFIVLYVDFKPQSGGGKC FN CYPAGVNITLANFNETKGPLCVDTSHFTTKYVAVYANVGRWSASINTGN CPFSFGKVNNFVKFGSVCFSLKDIPGGCAMPIVANWAYSKYYTIGSLYVS WSDGDGITGVPQPVEGVSSFMNVTLDKCTKYNIYDVSGVGVIRVSNDTFL NGITYTSTSGNLLGFKDVTKGTIYSITPCNPPDQLVVYQQAVVGAMLSEN FTSYGFSNVVELPKFFYASNGTYNCTDAVLTYSSFGVCADGSIIAVQPRN V SYDSVSAIVTANLSIPSNWTTSVQVEYLQITSTPIVVDCSTYVCNGNVRC V ELLKQYTSACKTIEDALRNSAMLESADVSEMLTFDKKAFTLANVSSFGDY NLSSVIPSLPRSGSRVAGRSAIEDILFSKLVTSGLGTVDADYKKCTKGLS IA DLACAQYYNGIMVLPGVADAERMAMYTGSLIGGIALGGLTSAASIPFSLA IQSRLNYVALQTDVLQENQKILAASFNKAMTNIVDAFTGVNDAITQTSQA LQTVATALNKIQDVVNQQGNSLNHLTSQLRQNFQAISSSIQAIYDRLDPP Q ADQQVDRLITGRLAALNVFVSHTLTKYTEVRASRQLAQQKVNECVKSQS KRYGFCGNGTHIFSLVNAAPEGLVFLHTVLLPTQYKDVEAWSGLCVDGR NGYVLRQPNLALYKEGNYYRITSRIMFEPRIPTIADFVQIENCNVTFVNI SR SELQTIVPEYIDLNKTLQELSYKLPNLTVKGSGGSGDIIKLLNEQVNKEM Q SSNLYMSMSSWCYTHSLDGAGLFLFDHAAEEYEHAKKLIIFLNENNVPVQ LTSISAPEHKFEGLTQIFQKAYEHEQHISESINNIVDHAIKSKDHATFNF LQ WYVAEQHEEEVLFKDILDKIELIGNENHGLYLADQYVKGIAKSRKSGS | 264 |
| | | 229E-1b06-v1-natlead | | CQTTNGLNTSYSVCNGCVGYSENVFAVESGGYIPSDFAFNNWFLLTNTSS VVDGVVRSFQPLLLNCLWSVSGLRFTTGFVYFNGTGRGDCKGFSSDVLS DVIRYNLNFEENLRRGTILFKTSYGVVVFYCTNNTLVSGDAHIPFGTVLG N FYCFVNTTIGNETTSAFVGALPKTVREFVISRTGHFYINGYRYFTLGNVE A VNFNVTTAETTDFCTVALASYADVLVNVSQTSIANIIYCNSVINRLRCDQ L SFDVPDGFYSTSPIQSVELPVSIVSLPVYHKHTFIVLYVDFKPQSGGGKC FN CYPAGVNITLANFNETKGPLCVDTSHFTTKYVAVYANVGRWSASINTGN CPFSFGKVNNFVKFGSVCFSLKDIPGGCAMPIVANWAYSKYYTIGSLYVS WSDGDGITGVPQPVEGVSSFMNVTLDKCTKYNIYDVSGVGVIRVSNDTFL NGITYTSTSGNLLGFKDVTKGTIYSITPCNPPDQLVVYQQAVVGAMLSEN FTSYGFSNVVELPKFFYASNGTYNCTDAVLTYSSFGVCADGSIIAVQPRN V SYDSVSAIVTANLSIPSNWTTSVQVEYLQITSTPIVVDCSTYVCNGNVRC V ELLKQYTSACKTIEDALRNSAMLESADVSEMLTFDKKAFTLANVSSFGDY NLSSVIPSLPRSGSRVAGRSAIEDILFSKLVTSGLGTVDADYKKCTKGLS IA DLACAQYYNGIMVLPGVADAERMAMYTGSLIGGIALGGLTSAASIPFSLA IQSRLNYVALQTDVLQENQKILAASFNKAMTNIVDAFTGVNDAITQTSQA LQTVATALNKIQDVVNQQGNSLNHLTSQLRQNFQAISSSIQAIYDRLDPP Q ADQQVDRLITGRLAALNVFVSHTLTKYTEVRASRQLAQQKVNECVKSQS KRYGFCGNGTHIFSLVNAAPEGLVFLHTVLLPTQYKDVEAWSGLCVDGR NGYVLRQPNLALYKEGNYYRITSRIMFEPRIPTIADFVQIENCNVTFVNI SR SELQTIVPEYIGDLNKTLQELSYKLPNLTVKGSGGSGDIIKLLNEQVNKE M QSSNLYMSMSSWCYTHSLDGAGLFLFDHAAEEYEHAKKLIIFLNENNVPV QLTSISAPEHKFEGLTQIFQKAYEHEQHISESINNIVDHAIKSKDHATFN FL QWYVAEQHEEEVLFKDILDKIELIGNENHGLYLADQYVKGIAKSRKSGS | 265 |
| | | NL63-1b06v0-natlead | | CNSNANLSMLQLGVPDNSSTIVTGLLPTHWFCANQSTSVYSANGFFYIDV GNHRSAFALHTGYYDANQYYIYVTNEIGLNASVTLKICKFSRNTTFDFLS NASSSFDCIVNLLFTEQLGAPLGITISGETVRLHLYNVTRTFYVPAAYKL T KLSVKCYFNYSCVFSVVNATVTVNVTTHNGRVVNYTVCDDCNGYTDNIF SVQQDGRIPNGFPFNNWFLLTNGSTLVDGVSRLYQPLRLTCLWPVPGLKS STGFVYFNATGSDVNCNGYQHNSVVDVMRYNLNFSANSLDNLKSGVIVF KTLQYDVLFYCSNSSSGVLDTTIPFGPSSQPYYCFINSTINTTTIVSTFV GILP PTVREIVVARTGQFYINGFKYFDLGFIEAVNFNVTTASATDFWTVAFATF V DVLVNVSATNIQNLLYCDSPFEKLQCEHLQFGLQDGFYSANFLDDNVLPE TYVALPIYYQHTDINFTATASFGGSCYVCKPHQVNISLNGNTSVCVRTSH F SIRYIYNRVKSGSPGDSSWHIYLKSGTCPFSFSKLNNFQKFKTICFSTVE VP GSCNFPLEATWHYTSYTIVGALYVTWSEGNSITGVPYPVSGIREFSNLVL N NCTKYNIYDYVGTGIIRSSNQSLAGGITYVSNSGNLLGFKNVSTGNIFIV TP CNQPDQVAVYQQSIIGAMTAVNESRYGLQNLLQLPNFYYVSNGGNNCTT AVMTYSNFGICADGSLIPVRPRNSSDNGISAIITANLSIPSNWTTSVQVE YL QITSTPIVVDCATYVCNGNPRCKNLLKQYTSACKTIEDALRLSAHLETND VSSMLTFDSNAFSLANVTSFGDYNLSSVLPQRNIRSSRIAGRSALEDLLF SK VVTSGLGTVDVDYKSCTKGLSIADLACAQYYNGIMVLPGVADAERMAM YTGSLIGGMVLGGLTSAAAIPFSLALQARLNYVALQTDVLQENQKILAAS FNKAINNIVASFSSVNDAITQTAEAIHTVTIALNKIQDVVNQQGSALNHL TS QLRHNFQAISNSIQAIYDRLDPPQADQQVDRLITGRLAALNAFVSQVLNK YTEVRGSRRLAQQKINECVKSQSNRYGFCGNGTHIFSIVNSAPDGLLFLH T VLLPTDYKNVKAWSGICVDGIYGYVLRQPNLVLYSDNGVFRVTSRVMFQ PRLPVLSDFVQIYNCNVTFVNISRVELHTVIPDYVDLNKTLQELAQNLEK L VKKGSGGSGDIIKLLNEQVNKEMQSSNLYMSMSSWCYTHSLDGAGLFLF DHAAEEYEHAKKLIIFLNENNVPVQLTSISAPEHKFEGLTQIFQKAYEHE Q HISESINNIVDHAIKSKDHATFNFLQWYVAEQHEEEVLFKDILDKIELIG NE NHGLYLADQYVKGIAKSRKSGS | 266 |
| | | NL63-1b06v1-natlead | | CNSNANLSMLQLGVPDNSSTIVTGLLPTHWFCANQSTSVYSANGFFYIDV GNHRSAFALHTGYYDANQYYIYVTNEIGLNASVTLKICKFSRNTTFDFLS NASSSFDCIVNLLFTEQLGAPLGITISGETVRLHLYNVTRTFYVPAAYKL T KLSVKCYFNYSCVFSVVNATVTVNVTTHNGRVVNYTVCDDCNGYTDNIF SVQQDGRIPNGFPFNNWFLLTNGSTLVDGVSRLYQPLRLTCLWPVPGLKS STGFVYFNATGSDVNCNGYQHNSVVDVMRYNLNFSANSLDNLKSGVIVF KTLQYDVLFYCSNSSSGVLDTTIPFGPSSQPYYCFINSTINTTTIVSTFV GILP PTVREIVVARTGQFYINGFKYFDLGFIEAVNFNVTTASATDFWTVAFATF V DVLVNVSATNIQNLLYCDSPFEKLQCEHLQFGLQDGFYSANFLDDNVLPE TYVALPIYYQHTDINFTATASFGGSCYVCKPHQVNISLNGNTSVCVRTSH F SIRYIYNRVKSGSPGDSSWHIYLKSGTCPFSFSKLNNFQKFKTICFSTVE VP GSCNFPLEATWHYTSYTIVGALYVTWSEGNSITGVPYPVSGIREFSNLVL N NCTKYNIYDYVGTGIIRSSNQSLAGGITYVSNSGNLLGFKNVSTGNIFIV TP CNQPDQVAVYQQSIIGAMTAVNESRYGLQNLLQLPNFYYVSNGGNNCTT AVMTYSNFGICADGSLIPVRPRNSSDNGISAIITANLSIPSNWTTSVQVE YL QITSTPIVVDCATYVCNGNPRCKNLLKQYTSACKTIEDALRLSAHLETND VSSMLTFDSNAFSLANVTSFGDYNLSSVLPQRNIRSSRIAGRSALEDLLF SK VVTSGLGTVDVDYKSCTKGLSIADLACAQYYNGIMVLPGVADAERMAM YTGSLIGGMVLGGLTSAAAIPFSLALQARLNYVALQTDVLQENQKILAAS FNKAINNIVASFSSVNDAITQTAEAIHTVTIALNKIQDVVNQQGSALNHL TS QLRHNFQAISNSIQAIYDRLDPPQADQQVDRLITGRLAALNAFVSQVLNK YTEVRGSRRLAQQKINECVKSQSNRYGFCGNGTHIFSIVNSAPDGLLFLH T VLLPTDYKNVKAWSGICVDGIYGYVLRQPNLVLYSDNGVFRVTSRVMFQ PRLPVLSDFVQIYNCNVTFVNISRVELHTVIPDYIGDLNKTLQELAQNLE K LVKKGSGGSGDIIKLLNEQVNKEMQSSNLYMSMSSWCYTHSLDGAGLFL FDHAAEEYEHAKKLIIFLNENNVPVQLTSISAPEHKFEGLTQIFQKAYEH E QHISESINNIVDHAIKSKDHATFNFLQWYVAEQHEEEVLFKDILDKIELI GN ENHGLYLADQYVKGIAKSRKSGS | 267 |
| | | HKU1-1b06v0-natlead | | VIGDFNCTNSFINDYNKTIPRISEDVVDVSLGLGTYYVLNRVYLNTTLLF T GYFPKSGANFRDLALKGSIYLSTLWYKPPFLSDFNNGIFSKVKNTKLYVN NTLYSEFSTIVIGSVFVNTSYTIVVQPHNGILEITACQYTMCEYPHTVCK SK GSIRNESWHIDSSEPLCLFKKNFTYNVSADWLYFHFYQERGVFYAYYADV GMPTTFLFSLYLGTILSHYYVMPLTCNAISSNTDNETLEYWVTPLSRRQY L LNFDEHGVITNAVDCSSSFLSEIQCKTQSFAPNTGVYDLSGFTVKPVATV Y RRIPNLPDCDIDNWLNNVSVPSPLNWERRIFSNCNFNLSTLLRLVHVDSF S CNNLDKSKIFGSCFNSITVDKFAIPNRRRDDLQLGSSGFLQSSNYKIDIS SSS CQLYYSLPLVNVTINNFNPSSWNRRYGFGSFNLSSYDVVYSDHCFSVNSD FCPCADPSVVNSCAKSKPPSAICPAGTKYRHCDLDTTLYVKNWCRCSCLP DPISTYSPNTCPQKKVVVGIGEHCPGLGINEEKCGTQLNHSSCFCSPDAF L GWSFDSCISNNRCNIFSNFIFNGINSGTTCSNDLLYSNTEISTGVCVNYD LY GITGQGIFKEVSAAYYNNWQNLLYDSNGNIIGFKDFLTNKTYTILPCYSG R VSAAFYQNSSSPALLYRNLKCSYVLNNISFISQPFYFDSYLGCVLNAVNL T SYSVSSCDLRMGSGFCIDYALPSSGGSGSGISSPYRFVTFEPFNVSFVND SV ETVGGLFEIQIPTNFTIAGHEEFIQTSSPKVTIDCSAFVCSNYAACHDLL SEY GTFCDNINSILNEVNDLLDITQLQVANALMQGVTLSSNLNTNLHSDVDNI DFKSLLGCLGSQCGSSSRSLLEDLLFNKVKLSDVGFVEAYNNCTGGSEIR D LLCVQSFNGIKVLPPILSETQISGYTTAATVAAMFPPWSAAAGVPFSLNV Q YRINGLGVTMDVLNKNQKLIANAFNKALLSIQNGFTATNSALAKIQSVVN ANAQALNSLLQQLFNKFGAISSSLQEILSRLDPPEAQVQIDRLINGRLTA LN AYVSQQLSDITLIKAGASRAIEKVNECVKSQSPRINFCGNGNHILSLVQN A PYGLLFIHFSYKPTSFKTVLVSPGLCLSGDRGIAPKQGYFIKQNDSWMFT G SSYYYPEPISDKNVVFMNSCSVNFTKAPFIYLNNSISELSDFEAELSQWH K NGSGGSGDIIKLLNEQVNKEMQSSNLYMSMSSWCYTHSLDGAGLFLFDH AAEEYEHAKKLIIFLNENNVPVQLTSISAPEHKFEGLTQIFQKAYEHEQH IS ESINNIVDHAIKSKDHATFNFLQWYVAEQHEEEVLFKDILDKIELIGNEN H GLYLADQYVKGIAKSRKSGS | 268 |
| | | HKU1-1b06v0-natlead-nogly | | VIGDFNCTNSFINDYNKTIPRISEDVVDVSLGLGTYYVLNRVYLNTTLLF T GYFPKSGANFRDLALKGSIYLSTLWYKPPFLSDFNNGIFSKVKNTKLYVN NTLYSEFSTIVIGSVFVNTSYTIVVQPHNGILEITACQYTMCEYPHTVCK SK GSIRNESWHIDSSEPLCLFKKNFTYNVSADWLYFHFYQERGVFYAYYADV GMPTTFLFSLYLGTILSHYYVMPLTCNAISSNTDNETLEYWVTPLSRRQY L LNFDEHGVITNAVDCSSSFLSEIQCKTQSFAPNTGVYDLSGFTVKPVATV Y RRIPNLPDCDIDNWLNNVSVPSPLNWERRIFSNCNFNLSTLLRLVHVDSF S CNNLDKSKIFGSCFNSITVDKFAIPNRRRDDLQLGSSGFLQSSNYKIDIS SSS CQLYYSLPLVNVTINNFNPSSWNRRYGFGSFNLSSYDVVYSDHCFSVNSD FCPCADPSVVNSCAKSKPPSAICPAGTKYRHCDLDTTLYVKNWCRCSCLP DPISTYSPNTCPQKKVVVGIGEHCPGLGINEEKCGTQLNHSSCFCSPDAF L GWSFDSCISNNRCNIFSNFIFNGINSGTTCSNDLLYSNTEISTGVCVNYD LY GITGQGIFKEVSAAYYNNWQNLLYDSNGNIIGFKDFLTNKTYTILPCYSG R VSAAFYQNSSSPALLYRNLKCSYVLNNISFISQPFYFDSYLGCVLNAVNL T SYSVSSCDLRMGSGFCIDYALPSSGGSGSGISSPYRFVTFEPFNVSFVND SV ETVGGLFEIQIPTNFTIAGHEEFIQTSSPKVTIDCSAFVCSNYAACHDLL SEY GTFCDNINSILNEVNDLLDITQLQVANALMQGVTLSSNLNTNLHSDVDNI DFKSLLGCLGSQCGSSSRSLLEDLLFNKVKLSDVGFVEAYNNCTGGSEIR D LLCVQSFNGIKVLPPILSETQISGYTTAATVAAMFPPWSAAAGVPFSLNV Q YRINGLGVTMDVLNKNQKLIANAFNKALLSIQNGFTATNSALAKIQSVVN ANAQALNSLLQQLFNKFGAISSSLQEILSRLDPPEAQVQIDRLINGRLTA LN AYVSQQLSDITLIKAGASRAIEKVNECVKSQSPRINFCGNGNHILSLVQN A PYGLLFIHFSYKPTSFKTVLVSPGLCLSGDRGIAPKQGYFIKQNDSWMFT G SSYYYPEPISDKNVVFMNSCSVNFTKAPFIYLNNSISELSDFEAELSQWH K QGSGGSGDIIKLLNEQVNKEMQSSNLYMSMSSWCYTHSLDGAGLFLFDH AAEEYEHAKKLIIFLNENNVPVQLTSISAPEHKFEGLTQIFQKAYEHEQH IS ESINNIVDHAIKSKDHATFNFLQWYVAEQHEEEVLFKDILDKIELIGNEN H GLYLADQYVKGIAKSRKSGS | 269 |
| | | HKU1-1b06v1-natlead | | VIGDFNCTNSFINDYNKTIPRISEDVVDVSLGLGTYYVLNRVYLNTTLLF T GYFPKSGANFRDLALKGSIYLSTLWYKPPFLSDFNNGIFSKVKNTKLYVN NTLYSEFSTIVIGSVFVNTSYTIVVQPHNGILEITACQYTMCEYPHTVCK SK GSIRNESWHIDSSEPLCLFKKNFTYNVSADWLYFHFYQERGVFYAYYADV GMPTTFLFSLYLGTILSHYYVMPLTCNAISSNTDNETLEYWVTPLSRRQY L LNFDEHGVITNAVDCSSSFLSEIQCKTQSFAPNTGVYDLSGFTVKPVATV Y RRIPNLPDCDIDNWLNNVSVPSPLNWERRIFSNCNFNLSTLLRLVHVDSF S CNNLDKSKIFGSCFNSITVDKFAIPNRRRDDLQLGSSGFLQSSNYKIDIS SSS CQLYYSLPLVNVTINNFNPSSWNRRYGFGSFNLSSYDVVYSDHCFSVNSD FCPCADPSVVNSCAKSKPPSAICPAGTKYRHCDLDTTLYVKNWCRCSCLP DPISTYSPNTCPQKKVVVGIGEHCPGLGINEEKCGTQLNHSSCFCSPDAF L GWSFDSCISNNRCNIFSNFIFNGINSGTTCSNDLLYSNTEISTGVCVNYD LY GITGQGIFKEVSAAYYNNWQNLLYDSNGNIIGFKDFLTNKTYTILPCYSG R VSAAFYQNSSSPALLYRNLKCSYVLNNISFISQPFYFDSYLGCVLNAVNL T SYSVSSCDLRMGSGFCIDYALPSSGGSGSGISSPYRFVTFEPFNVSFVND SV ETVGGLFEIQIPTNFTIAGHEEFIQTSSPKVTIDCSAFVCSNYAACHDLL SEY GTFCDNINSILNEVNDLLDITQLQVANALMQGVTLSSNLNTNLHSDVDNI DFKSLLGCLGSQCGSSSRSLLEDLLFNKVKLSDVGFVEAYNNCTGGSEIR D LLCVQSFNGIKVLPPILSETQISGYTTAATVAAMFPPWSAAAGVPFSLNV Q YRINGLGVTMDVLNKNQKLIANAFNKALLSIQNGFTATNSALAKIQSVVN ANAQALNSLLQQLFNKFGAISSSLQEILSRLDPPEAQVQIDRLINGRLTA LN AYVSQQLSDITLIKAGASRAIEKVNECVKSQSPRINFCGNGNHILSLVQN A PYGLLFIHFSYKPTSFKTVLVSPGLCLSGDRGIAPKQGYFIKQNDSWMFT G SSYYYPEPISDKNVVFMNSCSVNFTKAPFIYLNNLQSNLQDIEAELSQIH K NGSGGSGDIIKLLNEQVNKEMQSSNLYMSMSSWCYTHSLDGAGLFLFDH AAEEYEHAKKLIIFLNENNVPVQLTSISAPEHKFEGLTQIFQKAYEHEQH IS ESINNIVDHAIKSKDHATFNFLQWYVAEQHEEEVLFKDILDKIELIGNEN H GLYLADQYVKGIAKSRKSGS | 270 |
| | | HKU1-1b06v1-natlead-nogly | | VIGDFNCTNSFINDYNKTIPRISEDVVDVSLGLGTYYVLNRVYLNTTLLF T GYFPKSGANFRDLALKGSIYLSTLWYKPPFLSDFNNGIFSKVKNTKLYVN NTLYSEFSTIVIGSVFVNTSYTIVVQPHNGILEITACQYTMCEYPHTVCK SK GSIRNESWHIDSSEPLCLFKKNFTYNVSADWLYFHFYQERGVFYAYYADV GMPTTFLFSLYLGTILSHYYVMPLTCNAISSNTDNETLEYWVTPLSRRQY L LNFDEHGVITNAVDCSSSFLSEIQCKTQSFAPNTGVYDLSGFTVKPVATV Y RRIPNLPDCDIDNWLNNVSVPSPLNWERRIFSNCNFNLSTLLRLVHVDSF S CNNLDKSKIFGSCFNSITVDKFAIPNRRRDDLQLGSSGFLQSSNYKIDIS SSS CQLYYSLPLVNVTINNFNPSSWNRRYGFGSFNLSSYDVVYSDHCFSVNSD FCPCADPSVVNSCAKSKPPSAICPAGTKYRHCDLDTTLYVKNWCRCSCLP DPISTYSPNTCPQKKVVVGIGEHCPGLGINEEKCGTQLNHSSCFCSPDAF L GWSFDSCISNNRCNIFSNFIFNGINSGTTCSNDLLYSNTEISTGVCVNYD LY GITGQGIFKEVSAAYYNNWQNLLYDSNGNIIGFKDFLTNKTYTILPCYSG R VSAAFYQNSSSPALLYRNLKCSYVLNNISFISQPFYFDSYLGCVLNAVNL T SYSVSSCDLRMGSGFCIDYALPSSGGSGSGISSPYRFVTFEPFNVSFVND SV ETVGGLFEIQIPTNFTIAGHEEFIQTSSPKVTIDCSAFVCSNYAACHDLL SEY GTFCDNINSILNEVNDLLDITQLQVANALMQGVTLSSNLNTNLHSDVDNI DFKSLLGCLGSQCGSSSRSLLEDLLFNKVKLSDVGFVEAYNNCTGGSEIR D LLCVQSFNGIKVLPPILSETQISGYTTAATVAAMFPPWSAAAGVPFSLNV Q YRINGLGVTMDVLNKNQKLIANAFNKALLSIQNGFTATNSALAKIQSVVN ANAQALNSLLQQLFNKFGAISSSLQEILSRLDPPEAQVQIDRLINGRLTA LN AYVSQQLSDITLIKAGASRAIEKVNECVKSQSPRINFCGNGNHILSLVQN A PYGLLFIHFSYKPTSFKTVLVSPGLCLSGDRGIAPKQGYFIKQNDSWMFT G SSYYYPEPISDKNVVFMNSCSVNFTKAPFIYLNNLQSNLQDIEAELSQIH K QGSGGSGDIIKLLNEQVNKEMQSSNLYMSMSSWCYTHSLDGAGLFLFDH AAEEYEHAKKLIIFLNENNVPVQLTSISAPEHKFEGLTQIFQKAYEHEQH IS ESINNIVDHAIKSKDHATFNFLQWYVAEQHEEEVLFKDILDKIELIGNEN H GLYLADQYVKGIAKSRKSGS | 271 |
| | | HKU1-1b06v2-natlead | | VIGDFNCTNSFINDYNKTIPRISEDVVDVSLGLGTYYVLNRVYLNTTLLF T GYFPKSGANFRDLALKGSIYLSTLWYKPPFLSDFNNGIFSKVKNTKLYVN NTLYSEFSTIVIGSVFVNTSYTIVVQPHNGILEITACQYTMCEYPHTVCK SK GSIRNESWHIDSSEPLCLFKKNFTYNVSADWLYFHFYQERGVFYAYYADV GMPTTFLFSLYLGTILSHYYVMPLTCNAISSNTDNETLEYWVTPLSRRQY L LNFDEHGVITNAVDCSSSFLSEIQCKTQSFAPNTGVYDLSGFTVKPVATV Y RRIPNLPDCDIDNWLNNVSVPSPLNWERRIFSNCNFNLSTLLRLVHVDSF S CNNLDKSKIFGSCFNSITVDKFAIPNRRRDDLQLGSSGFLQSSNYKIDIS SSS CQLYYSLPLVNVTINNFNPSSWNRRYGFGSFNLSSYDVVYSDHCFSVNSD FCPCADPSVVNSCAKSKPPSAICPAGTKYRHCDLDTTLYVKNWCRCSCLP DPISTYSPNTCPQKKVVVGIGEHCPGLGINEEKCGTQLNHSSCFCSPDAF L GWSFDSCISNNRCNIFSNFIFNGINSGTTCSNDLLYSNTEISTGVCVNYD LY GITGQGIFKEVSAAYYNNWQNLLYDSNGNIIGFKDFLTNKTYTILPCYSG R VSAAFYQNSSSPALLYRNLKCSYVLNNISFISQPFYFDSYLGCVLNAVNL T SYSVSSCDLRMGSGFCIDYALPSSGGSGSGISSPYRFVTFEPFNVSFVND SV ETVGGLFEIQIPTNFTIAGHEEFIQTSSPKVTIDCSAFVCSNYAACHDLL SEY GTFCDNINSILNEVNDLLDITQLQVANALMQGVTLSSNLNTNLHSDVDNI DFKSLLGCLGSQCGSSSRSLLEDLLFNKVKLSDVGFVEAYNNCTGGSEIR D LLCVQSFNGIKVLPPILSETQISGYTTAATVAAMFPPWSAAAGVPFSLNV Q YRINGLGVTMDVLNKNQKLIANAFNKALLSIQNGFTATNSALAKIQSVVN ANAQALNSLLQQLFNKFGAISSSLQEILSRLDPPEAQVQIDRLINGRLTA LN AYVSQQLSDITLIKAGASRAIEKVNECVKSQSPRINFCGNGNHILSLVQN A PYGLLFIHFSYKPTSFKTVLVSPGLCLSGDRGIAPKQGYFIKQNDSWMFT G SSYYYPEPISDKNVVFMNSCSVNFTKAPFIYLNNLQSNLQDLEAELSQLH K NGSGGSGDIIKLLNEQVNKEMQSSNLYMSMSSWCYTHSLDGAGLFLFDH AAEEYEHAKKLIIFLNENNVPVQLTSISAPEHKFEGLTQIFQKAYEHEQH IS ESINNIVDHAIKSKDHATFNFLQWYVAEQHEEEVLFKDILDKIELIGNEN H GLYLADQYVKGIAKSRKSGS | 272 |
| | | HKU1-1b06v2-natlead-nogly | | VIGDFNCTNSFINDYNKTIPRISEDVVDVSLGLGTYYVLNRVYLNTTLLF T GYFPKSGANFRDLALKGSIYLSTLWYKPPFLSDFNNGIFSKVKNTKLYVN NTLYSEFSTIVIGSVFVNTSYTIVVQPHNGILEITACQYTMCEYPHTVCK SK GSIRNESWHIDSSEPLCLFKKNFTYNVSADWLYFHFYQERGVFYAYYADV GMPTTFLFSLYLGTILSHYYVMPLTCNAISSNTDNETLEYWVTPLSRRQY L LNFDEHGVITNAVDCSSSFLSEIQCKTQSFAPNTGVYDLSGFTVKPVATV Y RRIPNLPDCDIDNWLNNVSVPSPLNWERRIFSNCNFNLSTLLRLVHVDSF S CNNLDKSKIFGSCFNSITVDKFAIPNRRRDDLQLGSSGFLQSSNYKIDIS SSS CQLYYSLPLVNVTINNFNPSSWNRRYGFGSFNLSSYDVVYSDHCFSVNSD FCPCADPSVVNSCAKSKPPSAICPAGTKYRHCDLDTTLYVKNWCRCSCLP DPISTYSPNTCPQKKVVVGIGEHCPGLGINEEKCGTQLNHSSCFCSPDAF L GWSFDSCISNNRCNIFSNFIFNGINSGTTCSNDLLYSNTEISTGVCVNYD LY GITGQGIFKEVSAAYYNNWQNLLYDSNGNIIGFKDFLTNKTYTILPCYSG R VSAAFYQNSSSPALLYRNLKCSYVLNNISFISQPFYFDSYLGCVLNAVNL T SYSVSSCDLRMGSGFCIDYALPSSGGSGSGISSPYRFVTFEPFNVSFVND SV ETVGGLFEIQIPTNFTIAGHEEFIQTSSPKVTIDCSAFVCSNYAACHDLL SEY GTFCDNINSILNEVNDLLDITQLQVANALMQGVTLSSNLNTNLHSDVDNI DFKSLLGCLGSQCGSSSRSLLEDLLFNKVKLSDVGFVEAYNNCTGGSEIR D LLCVQSFNGIKVLPPILSETQISGYTTAATVAAMFPPWSAAAGVPFSLNV Q YRINGLGVTMDVLNKNQKLIANAFNKALLSIQNGFTATNSALAKIQSVVN ANAQALNSLLQQLFNKFGAISSSLQEILSRLDPPEAQVQIDRLINGRLTA LN AYVSQQLSDITLIKAGASRAIEKVNECVKSQSPRINFCGNGNHILSLVQN A PYGLLFIHFSYKPTSFKTVLVSPGLCLSGDRGIAPKQGYFIKQNDSWMFT G SSYYYPEPISDKNVVFMNSCSVNFTKAPFIYLNNLQSNLQDLEAELSQLH K QGSGGSGDIIKLLNEQVNKEMQSSNLYMSMSSWCYTHSLDGAGLFLFDH AAEEYEHAKKLIIFLNENNVPVQLTSISAPEHKFEGLTQIFQKAYEHEQH IS ESINNIVDHAIKSKDHATFNFLQWYVAEQHEEEVLFKDILDKIELIGNEN H GLYLADQYVKGIAKSRKSGS | 273 |
| | | HKU1-1b06v3-natlead-nogly | | VIGDFNCTNSFINDYNKTIPRISEDVVDVSLGLGTYYVLNRVYLNTTLLF T GYFPKSGANFRDLALKGSIYLSTLWYKPPFLSDFNNGIFSKVKNTKLYVN NTLYSEFSTIVIGSVFVNTSYTIVVQPHNGILEITACQYTMCEYPHTVCK SK GSIRNESWHIDSSEPLCLFKKNFTYNVSADWLYFHFYQERGVFYAYYADV GMPTTFLFSLYLGTILSHYYVMPLTCNAISSNTDNETLEYWVTPLSRRQY L LNFDEHGVITNAVDCSSSFLSEIQCKTQSFAPNTGVYDLSGFTVKPVATV Y RRIPNLPDCDIDNWLNNVSVPSPLNWERRIFSNCNFNLSTLLRLVHVDSF S CNNLDKSKIFGSCFNSITVDKFAIPNRRRDDLQLGSSGFLQSSNYKIDIS SSS CQLYYSLPLVNVTINNFNPSSWNRRYGFGSFNLSSYDVVYSDHCFSVNSD FCPCADPSVVNSCAKSKPPSAICPAGTKYRHCDLDTTLYVKNWCRCSCLP DPISTYSPNTCPQKKVVVGIGEHCPGLGINEEKCGTQLNHSSCFCSPDAF L GWSFDSCISNNRCNIFSNFIFNGINSGTTCSNDLLYSNTEISTGVCVNYD LY GITGQGIFKEVSAAYYNNWQNLLYDSNGNIIGFKDFLTNKTYTILPCYSG R VSAAFYQNSSSPALLYRNLKCSYVLNNISFISQPFYFDSYLGCVLNAVNL T SYSVSSCDLRMGSGFCIDYALPSSGGSGSGISSPYRFVTFEPFNVSFVND SV ETVGGLFEIQIPTNFTIAGHEEFIQTSSPKVTIDCSAFVCSNYAACHDLL SEY GTFCDNINSILNEVNDLLDITQLQVANALMQGVTLSSNLNTNLHSDVDNI DFKSLLGCLGSQCGSSSRSLLEDLLFNKVKLSDVGFVEAYNNCTGGSEIR D LLCVQSFNGIKVLPPILSETQISGYTTAATVAAMFPPWSAAAGVPFSLNV Q YRINGLGVTMDVLNKNQKLIANAFNKALLSIQNGFTATNSALAKIQSVVN ANAQALNSLLQQLFNKFGAISSSLQEILSRLDPPEAQVQIDRLINGRLTA LN AYVSQQLSDITLIKAGASRAIEKVNECVKSQSPRINFCGNGNHILSLVQN A PYGLLFIHFSYKPTSFKTVLVSPGLCLSGDRGIAPKQGYFIKQNDSWMFT G SSYYYPEPISDKNVVFMNSCSVNFTKAPFIYLNNSISNLQDIEAELSQIH KQ GSGGSGDIIKLLNEQVNKEMQSSNLYMSMSSWCYTHSLDGAGLFLFDHA AEEYEHAKKLIIFLNENNVPVQLTSISAPEHKFEGLTQIFQKAYEHEQHI SE SINNIVDHAIKSKDHATFNFLQWYVAEQHEEEVLFKDILDKIELIGNENH G LYLADQYVKGIAKSRKSGS | 274 |
| | | HKU1-1b06v4-natlead-nogly | | VIGDFNCTNSFINDYNKTIPRISEDVVDVSLGLGTYYVLNRVYLNTTLLF T GYFPKSGANFRDLALKGSIYLSTLWYKPPFLSDFNNGIFSKVKNTKLYVN NTLYSEFSTIVIGSVFVNTSYTIVVQPHNGILEITACQYTMCEYPHTVCK SK GSIRNESWHIDSSEPLCLFKKNFTYNVSADWLYFHFYQERGVFYAYYADV GMPTTFLFSLYLGTILSHYYVMPLTCNAISSNTDNETLEYWVTPLSRRQY L LNFDEHGVITNAVDCSSSFLSEIQCKTQSFAPNTGVYDLSGFTVKPVATV Y RRIPNLPDCDIDNWLNNVSVPSPLNWERRIFSNCNFNLSTLLRLVHVDSF S CNNLDKSKIFGSCFNSITVDKFAIPNRRRDDLQLGSSGFLQSSNYKIDIS SSS CQLYYSLPLVNVTINNFNPSSWNRRYGFGSFNLSSYDVVYSDHCFSVNSD FCPCADPSVVNSCAKSKPPSAICPAGTKYRHCDLDTTLYVKNWCRCSCLP DPISTYSPNTCPQKKVVVGIGEHCPGLGINEEKCGTQLNHSSCFCSPDAF L GWSFDSCISNNRCNIFSNFIFNGINSGTTCSNDLLYSNTEISTGVCVNYD LY GITGQGIFKEVSAAYYNNWQNLLYDSNGNIIGFKDFLTNKTYTILPCYSG R VSAAFYQNSSSPALLYRNLKCSYVLNNISFISQPFYFDSYLGCVLNAVNL T SYSVSSCDLRMGSGFCIDYALPSSGGSGSGISSPYRFVTFEPFNVSFVND SV ETVGGLFEIQIPTNFTIAGHEEFIQTSSPKVTIDCSAFVCSNYAACHDLL SEY GTFCDNINSILNEVNDLLDITQLQVANALMQGVTLSSNLNTNLHSDVDNI DFKSLLGCLGSQCGSSSRSLLEDLLFNKVKLSDVGFVEAYNNCTGGSEIR D LLCVQSFNGIKVLPPILSETQISGYTTAATVAAMFPPWSAAAGVPFSLNV Q YRINGLGVTMDVLNKNQKLIANAFNKALLSIQNGFTATNSALAKIQSVVN ANAQALNSLLQQLFNKFGAISSSLQEILSRLDPPEAQVQIDRLINGRLTA LN AYVSQQLSDITLIKAGASRAIEKVNECVKSQSPRINFCGNGNHILSLVQN A PYGLLFIHFSYKPTSFKTVLVSPGLCLSGDRGIAPKQGYFIKQNDSWMFT G SSYYYPEPISDKNVVFMNSCSVNFTKAPFIYLNNSISNLQDLEAELSQLH K QGSGGSGDIIKLLNEQVNKEMQSSNLYMSMSSWCYTHSLDGAGLFLFDH AAEEYEHAKKLIIFLNENNVPVQLTSISAPEHKFEGLTQIFQKAYEHEQH IS ESINNIVDHAIKSKDHATFNFLQWYVAEQHEEEVLFKDILDKIELIGNEN H GLYLADQYVKGIAKSRKSGS | 275 |
| | | M1-RBD-Ferr | | EGVECDFSPLLSGTPPQVYNFKRLVFTNCNYNLTKLLSLFSVNDFTCSQI SP AAIASNCYSSLILDYFSYPLSMKSDLSVSSAGPISQFNYKQSFSNPTCLI LAT VPHNLTTITKPLKYSYINKCSRLLSDDRTEVPQLVNANQYSPCVSIVPST V WEDGDYYRKQLSPLEGGGWLVASGSTVAMTEQLQMGFGITVQYGTDTN SVCPKGSGGGGESQVRQQFSKDIEKLLNEQVNKEMQSSNLYMSMSSWCY THSLDGAGLFLFDHAAEEYEHAKKLIIFLNENNVPVQLTSISAPEHKFEG L TQIFQKAYEHEQHISESINNIVDHAIKSKDHATFNFLQWYVAEQHEEEVL F KDILDKIELIGNENHGLYLADQYVKGIAKSRKSGS | 276 |
| | | M2-RBD-Ferr | | ECDFSPLLSGTPPQVYNFKRLVFTNCNYNLTKLLSLFSVNDFTCSQISPA AI ASNCYSSLILDYFSYPLSMKSDLSVSSAGPISQFNYKQSFSNPTCLILAT VP HNLTTITKPLKYSYINKCSRLLSDDRTEVPQLVNANQYSPCVSIVPSTVW E DGDYYRKQLSPLEGGGWLVASGSTVAMTEQLQMGFGITVQYGTDTNSV CPK GSGGGGESQVRQQFSKDIEKLLNEQVNKEMQSSNLYMSMSSWCYTHSLD GAGLFLFDHAAEEYEHAKKLIIFLNENNVPVQLTSISAPEHKFEGLTQIF QK AYEHEQHISESINNIVDHAIKSKDHATFNFLQWYVAEQHEEEVLFKDILD K IELIGNENHGLYLADQYVKGIAKSRKSGS | 277 |
| | | M3-RBD-Ferr | | EGVECDFSPLLSGTPPQVYNFKRLVFTNCNYNLTKLLSLFSVNDFTCSQI SP AAIASNCYSSLILDYFSYPLSMKSDLSVSSAGPISQFNYKQSFSNPTCLI LAT VPHNLTTITKPLKYSYINKCSRLLSDDRTEVPQLVNANQYSPCVSIVPST V WEDGDYYRKQLSPLEGGGWLVASGSTVAMTEQLQMGFGITVQNGTDTN SVCPK GSGGGGESQVRQQFSKDIEKLLNEQVNKEMQSSNLYMSMSSWCYTHSLD GAGLFLFDHAAEEYEHAKKLIIFLNENNVPVQLTSISAPEHKFEGLTQIF QK AYEHEQHISESINNIVDHAIKSKDHATFNFLQWYVAEQHEEEVLFKDILD K IELIGNENHGLYLADQYVKGIAKSRKSGS | 278 |
| | | M4-RBD-Ferr | | EGVECDFSPLLSGTPPQVYNFKRLVFTNCNYNLTKLLSLFSVNDFTCSQI SP AAIASNCYSSLILDYFSYPLSMKSDLSVSSAGPISQFNYKQSFSNPTCLI LAT VPHNLTTITKPLKYSYINKCSRLLSDDRTEVPQLVNANQYSPCVSIVPST V WEDGDYYRKQLSPLEGGGWLVASGSTVAMTEQLQMGFGITVQRGTDTN SVCPK GSGGGGESQVRQQFSKDIEKLLNEQVNKEMQSSNLYMSMSSWCYTHSLD GAGLFLFDHAAEEYEHAKKLIIFLNENNVPVQLTSISAPEHKFEGLTQIF QK AYEHEQHISESINNIVDHAIKSKDHATFNFLQWYVAEQHEEEVLFKDILD K IELIGNENHGLYLADQYVKGIAKSRKSGS | 279 |
| | | M5-RBD-Ferr | | ECDFSPLLSGTPPQVYNFKRLVFTNCNYNLTKLLSLFSVNDFTCSQISPA AI ASNCYSSLILDYFSYPLSMKSDLSVSSAGPISQFNYKQSFSNPTCLILAT VP HNLTTITKPLKYSYINKCSRLLSDDRTEVPQLVNANQYSPCVSIVPSTVW E DGDYYRKQLSPLEGGGWLVASGSTVAMTEQLQMGFGITVQNGTDTNSV CPK GSGGGGESQVRQQFSKDIEKLLNEQVNKEMQSSNLYMSMSSWCYTHSLD GAGLFLFDHAAEEYEHAKKLIIFLNENNVPVQLTSISAPEHKFEGLTQIF QK AYEHEQHISESINNIVDHAIKSKDHATFNFLQWYVAEQHEEEVLFKDILD K IELIGNENHGLYLADQYVKGIAKSRKSGS | 280 |
| | | M6-RBD-Ferr | | ECDFSPLLSGTPPQVYNFKRLVFTNCNYNLTKLLSLFSVNDFTCSQISPA AI ASNCYSSLILDYFSYPLSMKSDLSVSSAGPISQFNYKQSFSNPTCLILAT VP HNLTTITKPLKYSYINKCSRLLSDDRTEVPQLVNANQYSPCVSIVPSTVW E DGDYYRKQLSPLEGGGWLVASGSTVAMTEQLQMGFGITVQRGTDTNSV CPKGSGGGGESQVRQQFSKDIEKLLNEQVNKEMQSSNLYMSMSSWCYTH SLDGAGLFLFDHAAEEYEHAKKLIIFLNENNVPVQLTSISAPEHKFEGLT QI FQKAYEHEQHISESINNIVDHAIKSKDHATFNFLQWYVAEQHEEEVLFKD I LDKIELIGNENHGLYLADQYVKGIAKSRKSGS | 281 |
| Intentionally Left Blank | | | | | 282 |
| Intentionally Left Blank | | | | | 283 |
| 1B-05 with DS1 +D614G, native leader | pCoV204 | S2P.1154-DS1-del-Ferritin-D614G | | VNLTTRTQLPPAYTNSFTRGVYYPDKVFRSSVLHSTQDLFLPFFSNVTWF HAIHVSGTNGTKRFDNPVLPFNDGVYFASTEKSNIIRGWIFGTTLDSKTQ SLLIVNNATNVVIKVCEFQFCNDPFLGVYYHKNNKSWMESEFRVYSSANN CTFEYVSQPFLMDLEGKQGNFKNLREFVFKNIDGYFKIYSKHTPINLVRD LPQGFSALEPLVDLPIGINITRFQTLLALHRSYLTPGDSSSGWTAGAAAY YVGYLQPRTFLLKYNENGTITDAVDCALDPLSETKCTLKSFTVEKGIYQT SNFRVQPTESIVRFPNITNLCPFGEVFNATRFASVYAWNRKRISNCVADY SVLYNSASFSTFKCYGVCPTKLNDLCFTNVYADSFVIRGDEVRQIAPGQT GKIADYNYKLPDDFTGCVIAWNSNNLDSKVGGNYNYLYRLFRKSNLKPFE RDISTEIYQAGSTPCNGVEGFNCYFPLQSYGFQPTNGVGYQPYRVVVLSF ELLHAPATVCGPKKSTNLVKNKCVNFNFNGLTGTGVLTESNKKFLPFQQF GRDIADTTDAVRDPQTLEILDITPCSFGGVSVITPGTNTSNQVAVLYQGV NCTEVPVAIHADQLTPTWRVYSTGSNVFQTRAGCLIGAEHVNNSYECDIP IGAGICASYQTQTNSPGSASSVASQSIIAYTMSLGAENSVAYSNNSIAIP TNFTISVTTEILPVSMTKTSVDCTMYICGDSTECSNLLLQYGSFCTQLNR ALTGIAVEQDKNTQEVFAQVKQIYKTPPIKDFGGFNFSQILPDPSKPSKR SFIEDLLFNKVTLADAGFIKQYGDCLGDIAARDLICAQKFNGLTVLPPLL TDEMIAQYTSALLAGTITSGWTFGAGAALQIPFAMQMAYRFNGIGVTQNV LYENQKLIANQFNSAIGKIQDSLSSTASALGKLQDVVNQNAQALNTLVKQ LSSNFGAISSVLNDILSRLCPPEAEVQIDRLITGRLQSLQTYVTQQLIRA AEIRASANLAATKMSECVLGQSKRVDFCGKGYHLMSFPQSAPHGVVFLHV TYVPAQEKNFTTAPAICHDGKAHFPREGVFVSNGTHWFVTQRNFYEPQII TTDNTFVSGNCDVVIGIVNNTVYDPLQPELDSFKEELDKGSGGSGDIIKL LNEQVNKEMQSSNLYMSMSSWCYTHSLDGAGLFLFDHAAEEYEHAKKLII FLNENNVPVQLTSISAPEHKFEGLTQIFQKAYEHEQHISESINNIVDHAI KSKDHATFNFLQWYVAEQHEEEVLFKDILDKIELIGNENHGLYLADQYVK GIAKSRKSGS | 284 |
| 1B-06-PL with DS1 + D614G | pCoV205 | S2P.1158op1-DS1-del-Ferritin-D614G | | SSQCVNLTTRTQLPPAYTNSFTRGVYYPDKVFRSSVLHSTQDLFLPFFSN V TWFHAIHVSGTNGTKRFDNPVLPFNDGVYFASTEKSNIIRGWIFGTTLDS K TQSLLIVNNATNVVIKVCEFQFCNDPFLGVYYHKNNKSWMESEFRVYSSA NNCTFEYVSQPFLMDLEGKQGNFKNLREFVFKNIDGYFKIYSKHTPINLV R DLPQGFSALEPLVDLPIGINITRFQTLLALHRSYLTPGDSSSGWTAGAAA Y YVGYLQPRTFLLKYNENGTITDAVDCALDPLSETKCTLKSFTVEKGIYQT S NFRVQPTESIVRFPNITNLCPFGEVFNATRFASVYAWNRKRISNCVADYS V LYNSASFSTFKCYGVCPTKLNDLCFTNVYADSFVIRGDEVRQIAPGQTGK I ADYNYKLPDDFTGCVIAWNSNNLDSKVGGNYNYLYRLFRKSNLKPFERDI STEIYQAGSTPCNGVEGFNCYFPLQSYGFQPTNGVGYQPYRVVVLSFELL HAPATVCGPKKSTNLVKNKCVNFNFNGLTGTGVLTESNKKFLPFQQFGRD IADTTDAVRDPQTLEILDITPCSFGGVSVITPGTNTSNQVAVLYQGVNCT EVPVAIHADQLTPTWRVYSTGSNVFQTRAGCLIGAEHVNNSYECDIPIGA GICASYQTQTNSPGSASSVASQSIIAYTMSLGAENSVAYSNNSIAIPTNF TISVTTEILPVSMTKTSVDCTMYICGDSTECSNLLLQYGSFCTQLNRALT GIAVEQDKNTQEVFAQVKQIYKTPPIKDFGGFNFSQILPDPSKPSKRSFI EDLLFNKVTLADAGFIKQYGDCLGDIAARDLICAQKFNGLTVLPPLLTDE MIAQYTSALLAGTITSGWTFGAGAALQIPFAMQMAYRFNGIGVTQNVLYE NQKLIANQFNSAIGKIQDSLSSTASALGKLQDVVNQNAQALNTLVKQLSS NFGAISSVLNDILSRLCPPEAEVQIDRLITGRLQSLQTYVTQQLIRAAEI RASANLAATKMSECVLGQSKRVDFCGKGYHLMSFPQSAPHGVVFLHVTYV PAQEKNFTTAPAICHDGKAHFPREGVFVSNGTHWFVTQRNFYEPQIITTD NTFVSGNCDVVIGIVNNTVYDPLQSELDSIKEELDKIHKNGSGGSGDIIK LLNEQVNKEMQSSNLYMSMSSWCYTHSLDGAGLFLFDHAAEEYEHAKKLI IFLNENNVPVQLTSISAPEHKFEGLTQIFQKAYEHEQHISESINNIVDHA IKSKDHATFNFLQWYVAEQHEEEVLFKDILDKIELIGNENHGLYLADQYV KGIAKSRKSGS | 285 |
| 1B-08-PL with DS1 + D614G | pCoV206 | S2P.1158oplx2-DS1-del-Ferritin-D614G | | SSQCVNLTTRTQLPPAYTNSFTRGVYYPDKVFRSSVLHSTQDLFLPFFSN VTWFHAIHVSGTNGTKRFDNPVLPFNDGVYFASTEKSNIIRGWIFGTTLD SKTQSLLIVNNATNVVIKVCEFQFCNDPFLGVYYHKNNKSWMESEFRVYS SANNCTFEYVSQPFLMDLEGKQGNFKNLREFVFKNIDGYFKIYSKHTPIN LVRDLPQGFSALEPLVDLPIGINITRFQTLLALHRSYLTPGDSSSGWTAG AAAYYVGYLQPRTFLLKYNENGTITDAVDCALDPLSETKCTLKSFTVEKG IYQTSNFRVQPTESIVRFPNITNLCPFGEVFNATRFASVYAWNRKRISNC VADYSVLYNSASFSTFKCYGVCPTKLNDLCFTNVYADSFVIRGDEVRQIA PGQTGKIADYNYKLPDDFTGCVIAWNSNNLDSKVGGNYNYLYRLFRKSNL KPFERDISTEIYQAGSTPCNGVEGFNCYFPLQSYGFQPTNGVGYQPYRVV VLSFELLHAPATVCGPKKSTNLVKNKCVNFNFNGLTGTGVLTESNKKFLP FQQFGRDIADTTDAVRDPQTLEILDITPCSFGGVSVITPGTNTSNQVAVL YQGVNCTEVPVAIHADQLTPTWRVYSTGSNVFQTRAGCLIGAEHVNNSYE CDIPIGAGICASYQTQTNSPGSASSVASQSIIAYTMSLGAENSVAYSNNS IAIPTNFTISVTTEILPVSMTKTSVDCTMYICGDSTECSNLLLQYGSFCT QLNRALTGIAVEQDKNTQEVFAQVKQIYKTPPIKDFGGFNFSQILPDPSK PSKRSFIEDLLFNKVTLADAGFIKQYGDCLGDIAARDLICAQKFNGLTVL PPLLTDEMIAQYTSALLAGTITSGWTFGAGAALQIPFAMQMAYRFNGIGV TQNVLYENQKLIANQFNSAIGKIQDSLSSTASALGKLQDVVNQNAQALNT LVKQLSSNFGAISSVLNDILSRLCPPEAEVQIDRLITGRLQSLQTYVTQQ LIRAAEIRASANLAATKMSECVLGQSKRVDFCGKGYHLMSFPQSAPHGVV FLHVTYVPAQEKNFTTAPAICHDGKAHFPREGVFVSNGTHWFVTQRNFYE PQIITTDNTFVSGNCDVVIGIVNNTVYDPLQSELDSIKEELDKIHKNLDS IKEELDKIHKNGSGGSGDIIKLLNEQVNKEMQSSNLYMSMSSWCYTHSLD GAGLFLFDHAAEEYEHAKKLIIFLNENNVPVQLTSISAPEHKFEGLTQIF QKAYEHEQHISESINNIVDHAIKSKDHATFNFLQWYVAEQHEEEVLFKDI LDKIELIGNENHGLYLADQYVKGIAKSRKSGS | 286 |
| 1B-05 with N165Q (more “up” RBD) | pCoV207 | S2P.1154-del-Ferritin-N165Q | | VNLTTRTQLPPAYTNSFTRGVYYPDKVFRSSVLHSTQDLFLPFFSNVTWF HAIHVSGTNGTKRFDNPVLPFNDGVYFASTEKSNIIRGWIFGTTLDSKTQ SLLIVNNATNVVIKVCEFQFCNDPFLGVYYHKNNKSWMESEFRVYSSANQ CTFEYVSQPFLMDLEGKQGNFKNLREFVFKNIDGYFKIYSKHTPINLVRD LPQGFSALEPLVDLPIGINITRFQTLLALHRSYLTPGDSSSGWTAGAAAY YVGYLQPRTFLLKYNENGTITDAVDCALDPLSETKCTLKSFTVEKGIYQT SNFRVQPTESIVRFPNITNLCPFGEVFNATRFASVYAWNRKRISNCVADY SVLYNSASFSTFKCYGVSPTKLNDLCFTNVYADSFVIRGDEVRQIAPGQT GKIADYNYKLPDDFTGCVIAWNSNNLDSKVGGNYNYLYRLFRKSNLKPFE RDISTEIYQAGSTPCNGVEGFNCYFPLQSYGFQPTNGVGYQPYRVVVLSF ELLHAPATVCGPKKSTNLVKNKCVNFNFNGLTGTGVLTESNKKFLPFQQF GRDIADTTDAVRDPQTLEILDITPCSFGGVSVITPGTNTSNQVAVLYQDV NCTEVPVAIHADQLTPTWRVYSTGSNVFQTRAGCLIGAEHVNNSYECDIP IGAGICASYQTQTNSPGSASSVASQSIIAYTMSLGAENSVAYSNNSIAIP TNFTISVTTEILPVSMTKTSVDCTMYICGDSTECSNLLLQYGSFCTQLNR ALTGIAVEQDKNTQEVFAQVKQIYKTPPIKDFGGFNFSQILPDPSKPSKR SFIEDLLFNKVTLADAGFIKQYGDCLGDIAARDLICAQKFNGLTVLPPLL TDEMIAQYTSALLAGTITSGWTFGAGAALQIPFAMQMAYRFNGIGVTQNV LYENQKLIANQFNSAIGKIQDSLSSTASALGKLQDVVNQNAQALNTLVKQ LSSNFGAISSVLNDILSRLDPPEAEVQIDRLITGRLQSLQTYVTQQLIRA AEIRASANLAATKMSECVLGQSKRVDFCGKGYHLMSFPQSAPHGVVFLHV TYVPAQEKNFTTAPAICHDGKAHFPREGVFVSNGTHWFVTQRNFYEPQII TTDNTFVSGNCDVVIGIVNNTVYDPLQPELDSFKEELDKGSGGSGDIIKL LNEQVNKEMQSSNLYMSMSSWCYTHSLDGAGLFLFDHAAEEYEHAKKLII FLNENNVPVQLTSISAPEHKFEGLTQIFQKAYEHEQHISESINNIVDHAI KSKDHATFNFLQWYVAEQHEEEVLFKDILDKIELIGNENHGLYLADQYVK GIAKSRKSGS | 287 |
| 1B-05 with N234Q (more “down” RBD) | pCoV208 | S2P.1154-del-Ferritin-N234Q | | VNLTTRTQLPPAYTNSFTRGVYYPDKVFRSSVLHSTQDLFLPFFSNVTWF HAIHVSGTNGTKRFDNPVLPFNDGVYFASTEKSNIIRGWIFGTTLDSKTQ SLLIVNNATNVVIKVCEFQFCNDPFLGVYYHKNNKSWMESEFRVYSSANN CTFEYVSQPFLMDLEGKQGNFKNLREFVFKNIDGYFKIYSKHTPINLVRD LPQGFSALEPLVDLPIGIQITRFQTLLALHRSYLTPGDSSSGWTAGAAAY YVGYLQPRTFLLKYNENGTITDAVDCALDPLSETKCTLKSFTVEKGIYQT SNFRVQPTESIVRFPNITNLCPFGEVFNATRFASVYAWNRKRISNCVADY SVLYNSASFSTFKCYGVSPTKLNDLCFTNVYADSFVIRGDEVRQIAPGQT GKIADYNYKLPDDFTGCVIAWNSNNLDSKVGGNYNYLYRLFRKSNLKPFE RDISTEIYQAGSTPCNGVEGFNCYFPLQSYGFQPTNGVGYQPYRVVVLSF ELLHAPATVCGPKKSTNLVKNKCVNFNFNGLTGTGVLTESNKKFLPFQQF GRDIADTTDAVRDPQTLEILDITPCSFGGVSVITPGTNTSNQVAVLYQDV NCTEVPVAIHADQLTPTWRVYSTGSNVFQTRAGCLIGAEHVNNSYECDIP IGAGICASYQTQTNSPGSASSVASQSIIAYTMSLGAENSVAYSNNSIAIP TNFTISVTTEILPVSMTKTSVDCTMYICGDSTECSNLLLQYGSFCTQLNR ALTGIAVEQDKNTQEVFAQVKQIYKTPPIKDFGGFNFSQILPDPSKPSKR SFIEDLLFNKVTLADAGFIKQYGDCLGDIAARDLICAQKFNGLTVLPPLL TDEMIAQYTSALLAGTITSGWTFGAGAALQIPFAMQMAYRFNGIGVTQNV LYENQKLIANQFNSAIGKIQDSLSSTASALGKLQDVVNQNAQALNTLVKQ LSSNFGAISSVLNDILSRLDPPEAEVQIDRLITGRLQSLQTYVTQQLIRA AEIRASANLAATKMSECVLGQSKRVDFCGKGYHLMSFPQSAPHGVVFLHV TYVPAQEKNFTTAPAICHDGKAHFPREGVFVSNGTHWFVTQRNFYEPQII TTDNTFVSGNCDVVIGIVNNTVYDPLQPELDSFKEELDKGSGGSGDIIKL LNEQVNKEMQSSNLYMSMSSWCYTHSLDGAGLFLFDHAAEEYEHAKKLII FLNENNVPVQLTSISAPEHKFEGLTQIFQKAYEHEQHISESINNIVDHAI KSKDHATFNFLQWYVAEQHEEEVLFKDILDKIELIGNENHGLYLADQYVK GIAKSRKSGS | 288 |
| 1B-06-PL with N165Q (more “up” RBD) | pCoV209 | S2P.1158op1-del-Ferritin-N165Q | | SSQCVNLTTRTQLPPAYTNSFTRGVYYPDKVFRSSVLHSTQDLFLPFFSN VTWFHAIHVSGTNGTKRFDNPVLPFNDGVYFASTEKSNIIRGWIFGTTLD SKTQSLLIVNNATNVVIKVCEFQFCNDPFLGVYYHKNNKSWMESEFRVYS SANQCTFEYVSQPFLMDLEGKQGNFKNLREFVFKNIDGYFKIYSKHTPIN LVRDLPQGFSALEPLVDLPIGINITRFQTLLALHRSYLTPGDSSSGWTAG AAAYYVGYLQPRTFLLKYNENGTITDAVDCALDPLSETKCTLKSFTVEKG IYQTSNFRVQPTESIVRFPNITNLCPFGEVFNATRFASVYAWNRKRISNC VADYSVLYNSASFSTFKCYGVSPTKLNDLCFTNVYADSFVIRGDEVRQIA PGQTGKIADYNYKLPDDFTGCVIAWNSNNLDSKVGGNYNYLYRLFRKSNL KPFERDISTEIYQAGSTPCNGVEGFNCYFPLQSYGFQPTNGVGYQPYRVV VLSFELLHAPATVCGPKKSTNLVKNKCVNFNFNGLTGTGVLTESNKKFLP FQQFGRDIADTTDAVRDPQTLEILDITPCSFGGVSVITPGTNTSNQVAVL YQDVNCTEVPVAIHADQLTPTWRVYSTGSNVFQTRAGCLIGAEHVNNSYE CDIPIGAGICASYQTQTNSPGSASSVASQSIIAYTMSLGAENSVAYSNNS IAIPTNFTISVTTEILPVSMTKTSVDCTMYICGDSTECSNLLLQYGSFCT QLNRALTGIAVEQDKNTQEVFAQVKQIYKTPPIKDFGGFNFSQILPDPSK PSKRSFIEDLLFNKVTLADAGFIKQYGDCLGDIAARDLICAQKFNGLTVL PPLLTDEMIAQYTSALLAGTITSGWTFGAGAALQIPFAMQMAYRFNGIGV TQNVLYENQKLIANQFNSAIGKIQDSLSSTASALGKLQDVVNQNAQALNT LVKQLSSNFGAISSVLNDILSRLDPPEAEVQIDRLITGRLQSLQTYVTQQ LIRAAEIRASANLAATKMSECVLGQSKRVDFCGKGYHLMSFPQSAPHGVV FLHVTYVPAQEKNFTTAPAICHDGKAHFPREGVFVSNGTHWFVTQRNFYE PQIITTDNTFVSGNCDVVIGIVNNTVYDPLQSELDSIKEELDKIHKNGSG GSGDIIKLLNEQVNKEMQSSNLYMSMSSWCYTHSLDGAGLFLFDHAAEEY EHAKKLIIFLNENNVPVQLTSISAPEHKFEGLTQIFQKAYEHEQHISESI NNIVDHAIKSKDHATFNFLQWYVAEQHEEEVLFKDILDKIELIGNENHGL YLADQYVKGIAKSRKSGS | 289 |
| 1B-06-PL with N234Q (more “down” RBD) | pCoV210 | S2P.1158op1-del-Ferritin-N234Q | | SSQCVNLTTRTQLPPAYTNSFTRGVYYPDKVFRSSVLHSTQDLFLPFFSN VTWFHAIHVSGTNGTKRFDNPVLPFNDGVYFASTEKSNIIRGWIFGTTLD SKTQSLLIVNNATNVVIKVCEFQFCNDPFLGVYYHKNNKSWMESEFRVYS SANNCTFEYVSQPFLMDLEGKQGNFKNLREFVFKNIDGYFKIYSKHTPIN LVRDLPQGFSALEPLVDLPIGIQITRFQTLLALHRSYLTPGDSSSGWTAG AAAYYVGYLQPRTFLLKYNENGTITDAVDCALDPLSETKCTLKSFTVEKG IYQTSNFRVQPTESIVRFPNITNLCPFGEVFNATRFASVYAWNRKRISNC VADYSVLYNSASFSTFKCYGVSPTKLNDLCFTNVYADSFVIRGDEVRQIA PGQTGKIADYNYKLPDDFTGCVIAWNSNNLDSKVGGNYNYLYRLFRKSNL KPFERDISTEIYQAGSTPCNGVEGFNCYFPLQSYGFQPTNGVGYQPYRVV VLSFELLHAPATVCGPKKSTNLVKNKCVNFNFNGLTGTGVLTESNKKFLP FQQFGRDIADTTDAVRDPQTLEILDITPCSFGGVSVITPGTNTSNQVAVL YQDVNCTEVPVAIHADQLTPTWRVYSTGSNVFQTRAGCLIGAEHVNNSYE CDIPIGAGICASYQTQTNSPGSASSVASQSIIAYTMSLGAENSVAYSNNS IAIPTNFTISVTTEILPVSMTKTSVDCTMYICGDSTECSNLLLQYGSFCT QLNRALTGIAVEQDKNTQEVFAQVKQIYKTPPIKDFGGFNFSQILPDPSK PSKRSFIEDLLFNKVTLADAGFIKQYGDCLGDIAARDLICAQKFNGLTVL PPLLTDEMIAQYTSALLAGTITSGWTFGAGAALQIPFAMQMAYRFNGIGV TQNVLYENQKLIANQFNSAIGKIQDSLSSTASALGKLQDVVNQNAQALNT LVKQLSSNFGAISSVLNDILSRLDPPEAEVQIDRLITGRLQSLQTYVTQQ LIRAAEIRASANLAATKMSECVLGQSKRVDFCGKGYHLMSFPQSAPHGVV FLHVTYVPAQEKNFTTAPAICHDGKAHFPREGVFVSNGTHWFVTQRNFYE PQIITTDNTFVSGNCDVVIGIVNNTVYDPLQSELDSIKEELDKIHKNGSG GSGDIIKLLNEQVNKEMQSSNLYMSMSSWCYTHSLDGAGLFLFDHAAEEY EHAKKLIIFLNENNVPVQLTSISAPEHKFEGLTQIFQKAYEHEQHISESI NNIVDHAIKSKDHATFNFLQWYVAEQHEEEVLFKDILDKIELIGNENHGL YLADQYVKGIAKSRKSGS | 290 |
| 1B-06-PL with HexaPro + D614G + N165Q (more “up” RBD) | pCoV211 | S2P-HexaPro.1158op1-del-Ferritin-D614G-N165Q | | SSQCVNLTTRTQLPPAYTNSFTRGVYYPDKVFRSSVLHSTQDLFLPFFSN VTWFHAIHVSGTNGTKRFDNPVLPFNDGVYFASTEKSNIIRGWIFGTTLD SKTQSLLIVNNATNVVIKVCEFQFCNDPFLGVYYHKNNKSWMESEFRVYS SANQCTFEYVSQPFLMDLEGKQGNFKNLREFVFKNIDGYFKIYSKHTPIN LVRDLPQGFSALEPLVDLPIGINITRFQTLLALHRSYLTPGDSSSGWTAG AAAYYVGYLQPRTFLLKYNENGTITDAVDCALDPLSETKCTLKSFTVEKG IYQTSNFRVQPTESIVRFPNITNLCPFGEVFNATRFASVYAWNRKRISNC VADYSVLYNSASFSTFKCYGVSPTKLNDLCFTNVYADSFVIRGDEVRQIA PGQTGKIADYNYKLPDDFTGCVIAWNSNNLDSKVGGNYNYLYRLFRKSNL KPFERDISTEIYQAGSTPCNGVEGFNCYFPLQSYGFQPTNGVGYQPYRVV VLSFELLHAPATVCGPKKSTNLVKNKCVNFNFNGLTGTGVLTESNKKFLP FQQFGRDIADTTDAVRDPQTLEILDITPCSFGGVSVITPGTNTSNQVAVL YQGVNCTEVPVAIHADQLTPTWRVYSTGSNVFQTRAGCLIGAEHVNNSYE CDIPIGAGICASYQTQTNSPGSASSVASQSIIAYTMSLGAENSVAYSNNS IAIPTNFTISVTTEILPVSMTKTSVDCTMYICGDSTECSNLLLQYGSFCT QLNRALTGIAVEQDKNTQEVFAQVKQIYKTPPIKDFGGFNFSQILPDPSK PSKRSPIEDLLFNKVTLADAGFIKQYGDCLGDIAARDLICAQKFNGLTVL PPLLTDEMIAQYTSALLAGTITSGWTFGAGPALQIPFPMQMAYRFNGIGV TQNVLYENQKLIANQFNSAIGKIQDSLSSTPSALGKLQDVVNQNAQALNT LVKQLSSNFGAISSVLNDILSRLDPPEAEVQIDRLITGRLQSLQTYVTQQ LIRAAEIRASANLAATKMSECVLGQSKRVDFCGKGYHLMSFPQSAPHGVV FLHVTYVPAQEKNFTTAPAICHDGKAHFPREGVFVSNGTHWFVTQRNFYE PQIITTDNTFVSGNCDVVIGIVNNTVYDPLQSELDSIKEELDKIHKNGSG GSGDIIKLLNEQVNKEMQSSNLYMSMSSWCYTHSLDGAGLFLFDHAAEEY EHAKKLIIFLNENNVPVQLTSISAPEHKFEGLTQIFQKAYEHEQHISESI NNIVDHAIKSKDHATFNFLQWYVAEQHEEEVLFKDILDKIELIGNENHGL YLADQYVKGIAKSRKSGS | 291 |
| 1B-06-PL with HexaPro + D614G + N234Q (more “down” RBD) | pCoV212 | S2P-HexaPro.1158 op1-del-Ferritin-D614G-N234Q | | SSQCVNLTTRTQLPPAYTNSFTRGVYYPDKVFRSSVLHSTQDLFLPFFSN VTWFHAIHVSGTNGTKRFDNPVLPFNDGVYFASTEKSNIIRGWIFGTTLD SKTQSLLIVNNATNVVIKVCEFQFCNDPFLGVYYHKNNKSWMESEFRVYS SANNCTFEYVSQPFLMDLEGKQGNFKNLREFVFKNIDGYFKIYSKHTPIN LVRDLPQGFSALEPLVDLPIGIQITRFQTLLALHRSYLTPGDSSSGWTAG AAAYYVGYLQPRTFLLKYNENGTITDAVDCALDPLSETKCTLKSFTVEKG IYQTSNFRVQPTESIVRFPNITNLCPFGEVFNATRFASVYAWNRKRISNC VADYSVLYNSASFSTFKCYGVSPTKLNDLCFTNVYADSFVIRGDEVRQIA PGQTGKIADYNYKLPDDFTGCVIAWNSNNLDSKVGGNYNYLYRLFRKSNL KPFERDISTEIYQAGSTPCNGVEGFNCYFPLQSYGFQPTNGVGYQPYRVV VLSFELLHAPATVCGPKKSTNLVKNKCVNFNFNGLTGTGVLTESNKKFLP FQQFGRDIADTTDAVRDPQTLEILDITPCSFGGVSVITPGTNTSNQVAVL YQGVNCTEVPVAIHADQLTPTWRVYSTGSNVFQTRAGCLIGAEHVNNSYE CDIPIGAGICASYQTQTNSPGSASSVASQSIIAYTMSLGAENSVAYSNNS IAIPTNFTISVTTEILPVSMTKTSVDCTMYICGDSTECSNLLLQYGSFCT QLNRALTGIAVEQDKNTQEVFAQVKQIYKTPPIKDFGGFNFSQILPDPSK PSKRSPIEDLLFNKVTLADAGFIKQYGDCLGDIAARDLICAQKFNGLTVL PPLLTDEMIAQYTSALLAGTITSGWTFGAGPALQIPFPMQMAYRFNGIGV TQNVLYENQKLIANQFNSAIGKIQDSLSSTPSALGKLQDVVNQNAQALNT LVKQLSSNFGAISSVLNDILSRLDPPEAEVQIDRLITGRLQSLQTYVTQQ LIRAAEIRASANLAATKMSECVLGQSKRVDFCGKGYHLMSFPQSAPHGVV FLHVTYVPAQEKNFTTAPAICHDGKAHFPREGVFVSNGTHWFVTQRNFYE PQIITTDNTFVSGNCDVVIGIVNNTVYDPLQSELDSIKEELDKIHKNGSG GSGDIIKLLNEQVNKEMQSSNLYMSMSSWCYTHSLDGAGLFLFDHAAEEY EHAKKLIIFLNENNVPVQLTSISAPEHKFEGLTQIFQKAYEHEQHISESI NNIVDHAIKSKDHATFNFLQWYVAEQHEEEVLFKDILDKIELIGNENHGL YLADQYVKGIAKSRKSGS | 292 |
| 1B-08-PL with HexaPro + D614G + N165Q (more “up” RBD) | pCoV213 | S2P-HexaPro.1158 op1x2-del-Ferritin-D614G-N165Q | | SSQCVNLTTRTQLPPAYTNSFTRGVYYPDKVFRSSVLHSTQDLFLPFFSN VTWFHAIHVSGTNGTKRFDNPVLPFNDGVYFASTEKSNIIRGWIFGTTLD SKTQSLLIVNNATNVVIKVCEFQFCNDPFLGVYYHKNNKSWMESEFRVYS SANQCTFEYVSQPFLMDLEGKQGNFKNLREFVFKNIDGYFKIYSKHTPIN LVRDLPQGFSALEPLVDLPIGINITRFQTLLALHRSYLTPGDSSSGWTAG AAAYYVGYLQPRTFLLKYNENGTITDAVDCALDPLSETKCTLKSFTVEKG IYQTSNFRVQPTESIVRFPNITNLCPFGEVFNATRFASVYAWNRKRISNC VADYSVLYNSASFSTFKCYGVSPTKLNDLCFTNVYADSFVIRGDEVRQIA PGQTGKIADYNYKLPDDFTGCVIAWNSNNLDSKVGGNYNYLYRLFRKSNL KPFERDISTEIYQAGSTPCNGVEGFNCYFPLQSYGFQPTNGVGYQPYRVV VLSFELLHAPATVCGPKKSTNLVKNKCVNFNFNGLTGTGVLTESNKKFLP FQQFGRDIADTTDAVRDPQTLEILDITPCSFGGVSVITPGTNTSNQVAVL YQGVNCTEVPVAIHADQLTPTWRVYSTGSNVFQTRAGCLIGAEHVNNSYE CDIPIGAGICASYQTQTNSPGSASSVASQSIIAYTMSLGAENSVAYSNNS IAIPTNFTISVTTEILPVSMTKTSVDCTMYICGDSTECSNLLLQYGSFCT QLNRALTGIAVEQDKNTQEVFAQVKQIYKTPPIKDFGGFNFSQILPDPSK PSKRSPIEDLLFNKVTLADAGFIKQYGDCLGDIAARDLICAQKFNGLTVL PPLLTDEMIAQYTSALLAGTITSGWTFGAGPALQIPFPMQMAYRFNGIGV TQNVLYENQKLIANQFNSAIGKIQDSLSSTPSALGKLQDVVNQNAQALNT LVKQLSSNFGAISSVLNDILSRLDPPEAEVQIDRLITGRLQSLQTYVTQQ LIRAAEIRASANLAATKMSECVLGQSKRVDFCGKGYHLMSFPQSAPHGVV FLHVTYVPAQEKNFTTAPAICHDGKAHFPREGVFVSNGTHWFVTQRNFYE PQIITTDNTFVSGNCDVVIGIVNNTVYDPLQSELDSIKEELDKIHKNLDS IKEELDKIHKNGSGGSGDIIKLLNEQVNKEMQSSNLYMSMSSWCYTHSLD GAGLFLFDHAAEEYEHAKKLIIFLNENNVPVQLTSISAPEHKFEGLTQIF QKAYEHEQHISESINNIVDHAIKSKDHATFNFLQWYVAEQHEEEVLFKDI LDKIELIGNENHGLYLADQYVKGIAKSRKSGS | 293 |
| 1B-08-PL with HexaPro + D614G + N234Q (more “down” RBD) | pCoV214 | S2P-HexaPro.1158 op1x2-del-Ferritin-D614G-N234Q | | SSQCVNLTTRTQLPPAYTNSFTRGVYYPDKVFRSSVLHSTQDLFLPFFSN VTWFHAIHVSGTNGTKRFDNPVLPFNDGVYFASTEKSNIIRGWIFGTTLD SKTQSLLIVNNATNVVIKVCEFQFCNDPFLGVYYHKNNKSWMESEFRVYS SANNCTFEYVSQPFLMDLEGKQGNFKNLREFVFKNIDGYFKIYSKHTPIN LVRDLPQGFSALEPLVDLPIGIQITRFQTLLALHRSYLTPGDSSSGWTAG AAAYYVGYLQPRTFLLKYNENGTITDAVDCALDPLSETKCTLKSFTVEKG IYQTSNFRVQPTESIVRFPNITNLCPFGEVFNATRFASVYAWNRKRISNC VADYSVLYNSASFSTFKCYGVSPTKLNDLCFTNVYADSFVIRGDEVRQIA PGQTGKIADYNYKLPDDFTGCVIAWNSNNLDSKVGGNYNYLYRLFRKSNL KPFERDISTEIYQAGSTPCNGVEGFNCYFPLQSYGFQPTNGVGYQPYRVV VLSFELLHAPATVCGPKKSTNLVKNKCVNFNFNGLTGTGVLTESNKKFLP FQQFGRDIADTTDAVRDPQTLEILDITPCSFGGVSVITPGTNTSNQVAVL YQGVNCTEVPVAIHADQLTPTWRVYSTGSNVFQTRAGCLIGAEHVNNSYE CDIPIGAGICASYQTQTNSPGSASSVASQSIIAYTMSLGAENSVAYSNNS IAIPTNFTISVTTEILPVSMTKTSVDCTMYICGDSTECSNLLLQYGSFCT QLNRALTGIAVEQDKNTQEVFAQVKQIYKTPPIKDFGGFNFSQILPDPSK PSKRSPIEDLLFNKVTLADAGFIKQYGDCLGDIAARDLICAQKFNGLTVL PPLLTDEMIAQYTSALLAGTITSGWTFGAGPALQIPFPMQMAYRFNGIGV TQNVLYENQKLIANQFNSAIGKIQDSLSSTPSALGKLQDVVNQNAQALNT LVKQLSSNFGAISSVLNDILSRLDPPEAEVQIDRLITGRLQSLQTYVTQQ LIRAAEIRASANLAATKMSECVLGQSKRVDFCGKGYHLMSFPQSAPHGVV FLHVTYVPAQEKNFTTAPAICHDGKAHFPREGVFVSNGTHWFVTQRNFYE PQIITTDNTFVSGNCDVVIGIVNNTVYDPLQSELDSIKEELDKIHKNLDS IKEELDKIHKNGSGGSGDIIKLLNEQVNKEMQSSNLYMSMSSWCYTHSLD GAGLFLFDHAAEEYEHAKKLIIFLNENNVPVQLTSISAPEHKFEGLTQIF QKAYEHEQHISESINNIVDHAIKSKDHATFNFLQWYVAEQHEEEVLFKDI LDKIELIGNENHGLYLADQYVKGIAKSRKSGS | 294 |
| 1B-06-PL with glycan at N146 on Ferritin to fill in gap | pCoV215 | S2P.1158op1-del-Ferritin-N146glyc | | SSQCVNLTTRTQLPPAYTNSFTRGVYYPDKVFRSSVLHSTQDLFLPFFSN VTWFHAIHVSGTNGTKRFDNPVLPFNDGVYFASTEKSNIIRGWIFGTTLD SKTQSLLIVNNATNVVIKVCEFQFCNDPFLGVYYHKNNKSWMESEFRVYS SANNCTFEYVSQPFLMDLEGKQGNFKNLREFVFKNIDGYFKIYSKHTPIN LVRDLPQGFSALEPLVDLPIGINITRFQTLLALHRSYLTPGDSSSGWTAG AAAYYVGYLQPRTFLLKYNENGTITDAVDCALDPLSETKCTLKSFTVEKG IYQTSNFRVQPTESIVRFPNITNLCPFGEVFNATRFASVYAWNRKRISNC VADYSVLYNSASFSTFKCYGVSPTKLNDLCFTNVYADSFVIRGDEVRQIA PGQTGKIADYNYKLPDDFTGCVIAWNSNNLDSKVGGNYNYLYRLFRKSNL KPFERDISTEIYQAGSTPCNGVEGFNCYFPLQSYGFQPTNGVGYQPYRVV VLSFELLHAPATVCGPKKSTNLVKNKCVNFNFNGLTGTGVLTESNKKFLP FQQFGRDIADTTDAVRDPQTLEILDITPCSFGGVSVITPGTNTSNQVAVL YQDVNCTEVPVAIHADQLTPTWRVYSTGSNVFQTRAGCLIGAEHVNNSYE CDIPIGAGICASYQTQTNSPGSASSVASQSIIAYTMSLGAENSVAYSNNS IAIPTNFTISVTTEILPVSMTKTSVDCTMYICGDSTECSNLLLQYGSFCT QLNRALTGIAVEQDKNTQEVFAQVKQIYKTPPIKDFGGFNFSQILPDPSK PSKRSFIEDLLFNKVTLADAGFIKQYGDCLGDIAARDLICAQKFNGLTVL PPLLTDEMIAQYTSALLAGTITSGWTFGAGAALQIPFAMQMAYRFNGIGV TQNVLYENQKLIANQFNSAIGKIQDSLSSTASALGKLQDVVNQNAQALNT LVKQLSSNFGAISSVLNDILSRLDPPEAEVQIDRLITGRLQSLQTYVTQQ LIRAAEIRASANLAATKMSECVLGQSKRVDFCGKGYHLMSFPQSAPHGVV FLHVTYVPAQEKNFTTAPAICHDGKAHFPREGVFVSNGTHWFVTQRNFYE PQIITTDNTFVSGNCDVVIGIVNNTVYDPLQSELDSIKEELDKIHKNGSG GSGDIIKLLNEQVNKEMQSSNLYMSMSSWCYTHSLDGAGLFLFDHAAEEY EHAKKLIIFLNENNVPVQLTSISAPEHKFEGLTQIFQKAYEHEQHISESI NNIVDHAIKSKDHATFNFLQWYVAEQHEEEVLFKDILDKIELIGNETHGL YLADQYVKGIAKSRKSGS | 295 |
| 1B-06-PL with glycan at N77on Ferritin to fill in gap | pCoV216 | S2P.1158op1-DS1-del-Ferritin-N77glyc | | SSQCVNLTTRTQLPPAYTNSFTRGVYYPDKVFRSSVLHSTQDLFLPFFSN VTWFHAIHVSGTNGTKRFDNPVLPFNDGVYFASTEKSNIIRGWIFGTTLD SKTQSLLIVNNATNVVIKVCEFQFCNDPFLGVYYHKNNKSWMESEFRVYS SANNCTFEYVSQPFLMDLEGKQGNFKNLREFVFKNIDGYFKIYSKHTPIN LVRDLPQGFSALEPLVDLPIGINITRFQTLLALHRSYLTPGDSSSGWTAG AAAYYVGYLQPRTFLLKYNENGTITDAVDCALDPLSETKCTLKSFTVEKG IYQTSNFRVQPTESIVRFPNITNLCPFGEVFNATRFASVYAWNRKRISNC VADYSVLYNSASFSTFKCYGVSPTKLNDLCFTNVYADSFVIRGDEVRQIA PGQTGKIADYNYKLPDDFTGCVIAWNSNNLDSKVGGNYNYLYRLFRKSNL KPFERDISTEIYQAGSTPCNGVEGFNCYFPLQSYGFQPTNGVGYQPYRVV VLSFELLHAPATVCGPKKSTNLVKNKCVNFNFNGLTGTGVLTESNKKFLP FQQFGRDIADTTDAVRDPQTLEILDITPCSFGGVSVITPGTNTSNQVAVL YQDVNCTEVPVAIHADQLTPTWRVYSTGSNVFQTRAGCLIGAEHVNNSYE CDIPIGAGICASYQTQTNSPGSASSVASQSIIAYTMSLGAENSVAYSNNS IAIPTNFTISVTTEILPVSMTKTSVDCTMYICGDSTECSNLLLQYGSFCT QLNRALTGIAVEQDKNTQEVFAQVKQIYKTPPIKDFGGFNFSQILPDPSK PSKRSFIEDLLFNKVTLADAGFIKQYGDCLGDIAARDLICAQKFNGLTVL PPLLTDEMIAQYTSALLAGTITSGWTFGAGAALQIPFAMQMAYRFNGIGV TQNVLYENQKLIANQFNSAIGKIQDSLSSTASALGKLQDVVNQNAQALNT LVKQLSSNFGAISSVLNDILSRLDPPEAEVQIDRLITGRLQSLQTYVTQQ LIRAAEIRASANLAATKMSECVLGQSKRVDFCGKGYHLMSFPQSAPHGVV FLHVTYVPAQEKNFTTAPAICHDGKAHFPREGVFVSNGTHWFVTQRNFYE PQIITTDNTFVSGNCDVVIGIVNNTVYDPLQSELDSIKEELDKIHKNGSG GSGDIIKLLNEQVNKEMQSSNLYMSMSSWCYTHSLDGAGLFLFDHAAEEY EHAKKLIIFLNENNVPVQLTSISAPNHSFEGLTQIFQKAYEHEQHISESI NNIVDHAIKSKDHATFNFLQWYVAEQHEEEVLFKDILDKIELIGNENHGL YLADQYVKGIAKSRKSGS | 296 |
| 1B-06-PL with HexaPro + D614G with glycan at N146 on Ferritin to fill in gap | pCoV217 | S2P-HexaPro.1158op1-del-Ferritin-D614G-N146glyc | | SSQCVNLTTRTQLPPAYTNSFTRGVYYPDKVFRSSVLHSTQDLFLPFFSN V TWFHAIHVSGTNGTKRFDNPVLPFNDGVYFASTEKSNIIRGWIFGTTLDS K TQSLLIVNNATNVVIKVCEFQFCNDPFLGVYYHKNNKSWMESEFRVYSSA NNCTFEYVSQPFLMDLEGKQGNFKNLREFVFKNIDGYFKIYSKHTPINLV R DLPQGFSALEPLVDLPIGINITRFQTLLALHRSYLTPGDSSSGWTAGAAA Y YVGYLQPRTFLLKYNENGTITDAVDCALDPLSETKCTLKSFTVEKGIYQT S NFRVQPTESIVRFPNITNLCPFGEVFNATRFASVYAWNRKRISNCVADYS V LYNSASFSTFKCYGVSPTKLNDLCFTNVYADSFVIRGDEVRQIAPGQTGK I ADYNYKLPDDFTGCVIAWNSNNLDSKVGGNYNYLYRLFRKSNLKPFERD ISTEIYQAGSTPCNGVEGFNCYFPLQSYGFQPTNGVGYQPYRVVVLSFEL L HAPATVCGPKKSTNLVKNKCVNFNFNGLTGTGVLTESNKKFLPFQQFGR DIADTTDAVRDPQTLEILDITPCSFGGVSVITPGTNTSNQVAVLYQGVNC T EVPVAIHADQLTPTWRVYSTGSNVFQTRAGCLIGAEHVNNSYECDIPIGA GICASYQTQTNSPGSASSVASQSIIAYTMSLGAENSVAYSNNSIAIPTNF TIS VTTEILPVSMTKTSVDCTMYICGDSTECSNLLLQYGSFCTQLNRALTGIA V EQDKNTQEVFAQVKQIYKTPPIKDFGGFNFSQILPDPSKPSKRSPIEDLL FN KVTLADAGFIKQYGDCLGDIAARDLICAQKFNGLTVLPPLLTDEMIAQYT SALLAGTITSGWTFGAGPALQIPFPMQMAYRFNGIGVTQNVLYENQKLIA NQFNSAIGKIQDSLSSTPSALGKLQDVVNQNAQALNTLVKQLSSNFGAIS S VLNDILSRLDPPEAEVQIDRLITGRLQSLQTYVTQQLIRAAEIRASANLA AT KMSECVLGQSKRVDFCGKGYHLMSFPQSAPHGVVFLHVTYVPAQEKNFT TAPAICHDGKAHFPREGVFVSNGTHWFVTQRNFYEPQIITTDNTFVSGNC DVVIGIVNNTVYDPLQSELDSIKEELDKIHKNGSGGSGDIIKLLNEQVNK E MQSSNLYMSMSSWCYTHSLDGAGLFLFDHAAEEYEHAKKLIIFLNENNV PVQLTSISAPEHKFEGLTQIFQKAYEHEQHISESINNIVDHAIKSKDHAT FNF LQWYVAEQHEEEVLFKDILDKIELIGNETHGLYLADQYVKGIAKSRKSGS | 297 |
| 1B-06-PL with HexaPro + D614G with glycan at N77on Ferritin to fill in gap | pCoV218 | S2P-HexaPro.1158op1-del-Ferritin-D614G-N77glyc | | SSQCVNLTTRTQLPPAYTNSFTRGVYYPDKVFRSSVLHSTQDLFLPFFSN V TWFHAIHVSGTNGTKRFDNPVLPFNDGVYFASTEKSNIIRGWIFGTTLDS K TQSLLIVNNATNVVIKVCEFQFCNDPFLGVYYHKNNKSWMESEFRVYSSA NNCTFEYVSQPFLMDLEGKQGNFKNLREFVFKNIDGYFKIYSKHTPINLV R DLPQGFSALEPLVDLPIGINITRFQTLLALHRSYLTPGDSSSGWTAGAAA Y YVGYLQPRTFLLKYNENGTITDAVDCALDPLSETKCTLKSFTVEKGIYQT S NFRVQPTESIVRFPNITNLCPFGEVFNATRFASVYAWNRKRISNCVADYS V LYNSASFSTFKCYGVSPTKLNDLCFTNVYADSFVIRGDEVRQIAPGQTGK I ADYNYKLPDDFTGCVIAWNSNNLDSKVGGNYNYLYRLFRKSNLKPFERD ISTEIYQAGSTPCNGVEGFNCYFPLQSYGFQPTNGVGYQPYRVVVLSFEL L HAPATVCGPKKSTNLVKNKCVNFNFNGLTGTGVLTESNKKFLPFQQFGR DIADTTDAVRDPQTLEILDITPCSFGGVSVITPGTNTSNQVAVLYQGVNC T EVPVAIHADQLTPTWRVYSTGSNVFQTRAGCLIGAEHVNNSYECDIPIGA GICASYQTQTNSPGSASSVASQSIIAYTMSLGAENSVAYSNNSIAIPTNF TIS VTTEILPVSMTKTSVDCTMYICGDSTECSNLLLQYGSFCTQLNRALTGIA V EQDKNTQEVFAQVKQIYKTPPIKDFGGFNFSQILPDPSKPSKRSPIEDLL FN KVTLADAGFIKQYGDCLGDIAARDLICAQKFNGLTVLPPLLTDEMIAQYT SALLAGTITSGWTFGAGPALQIPFPMQMAYRFNGIGVTQNVLYENQKLIA NQFNSAIGKIQDSLSSTPSALGKLQDVVNQNAQALNTLVKQLSSNFGAIS S VLNDILSRLDPPEAEVQIDRLITGRLQSLQTYVTQQLIRAAEIRASANLA AT KMSECVLGQSKRVDFCGKGYHLMSFPQSAPHGVVFLHVTYVPAQEKNFT TAPAICHDGKAHFPREGVFVSNGTHWFVTQRNFYEPQIITTDNTFVSGNC DVVIGIVNNTVYDPLQSELDSIKEELDKIHKNGSGGSGDIIKLLNEQVNK E MQSSNLYMSMSSWCYTHSLDGAGLFLFDHAAEEYEHAKKLIIFLNENNV PVQLTSISAPNHSFEGLTQIFQKAYEHEQHISESINNIVDHAIKSKDHAT FNF LQWYVAEQHEEEVLFKDILDKIELIGNENHGLYLADQYVKGIAKSRKSGS | 298 |
| 1B-08-PL with HexaPro + D614G with glycan at N146 on Ferritin to fill in gap | pCoV219 | S2P-HexaPro.1158oplx2-del-Ferritin-D614G-N146glyc | | SSQCVNLTTRTQLPPAYTNSFTRGVYYPDKVFRSSVLHSTQDLFLPFFSN V TWFHAIHVSGTNGTKRFDNPVLPFNDGVYFASTEKSNIIRGWIFGTTLDS K TQSLLIVNNATNVVIKVCEFQFCNDPFLGVYYHKNNKSWMESEFRVYSSA NNCTFEYVSQPFLMDLEGKQGNFKNLREFVFKNIDGYFKIYSKHTPINLV R DLPQGFSALEPLVDLPIGINITRFQTLLALHRSYLTPGDSSSGWTAGAAA Y YVGYLQPRTFLLKYNENGTITDAVDCALDPLSETKCTLKSFTVEKGIYQT S NFRVQPTESIVRFPNITNLCPFGEVFNATRFASVYAWNRKRISNCVADYS V LYNSASFSTFKCYGVSPTKLNDLCFTNVYADSFVIRGDEVRQIAPGQTGK I ADYNYKLPDDFTGCVIAWNSNNLDSKVGGNYNYLYRLFRKSNLKPFERD ISTEIYQAGSTPCNGVEGFNCYFPLQSYGFQPTNGVGYQPYRVVVLSFEL L HAPATVCGPKKSTNLVKNKCVNFNFNGLTGTGVLTESNKKFLPFQQFGR DIADTTDAVRDPQTLEILDITPCSFGGVSVITPGTNTSNQVAVLYQGVNC T EVPVAIHADQLTPTWRVYSTGSNVFQTRAGCLIGAEHVNNSYECDIPIGA GICASYQTQTNSPGSASSVASQSIIAYTMSLGAENSVAYSNNSIAIPTNF TIS VTTEILPVSMTKTSVDCTMYICGDSTECSNLLLQYGSFCTQLNRALTGIA V EQDKNTQEVFAQVKQIYKTPPIKDFGGFNFSQILPDPSKPSKRSPIEDLL FN KVTLADAGFIKQYGDCLGDIAARDLICAQKFNGLTVLPPLLTDEMIAQYT SALLAGTITSGWTFGAGPALQIPFPMQMAYRFNGIGVTQNVLYENQKLIA NQFNSAIGKIQDSLSSTPSALGKLQDVVNQNAQALNTLVKQLSSNFGAIS S VLNDILSRLDPPEAEVQIDRLITGRLQSLQTYVTQQLIRAAEIRASANLA AT KMSECVLGQSKRVDFCGKGYHLMSFPQSAPHGVVFLHVTYVPAQEKNFT TAPAICHDGKAHFPREGVFVSNGTHWFVTQRNFYEPQIITTDNTFVSGNC DVVIGIVNNTVYDPLQSELDSIKEELDKIHKNLDSIKEELDKIHKNGSGG SG DIIKLLNEQVNKEMQSSNLYMSMSSWCYTHSLDGAGLFLFDHAAEEYEH AKKLIIFLNENNVPVQLTSISAPEHKFEGLTQIFQKAYEHEQHISESINN IVD HAIKSKDHATFNFLQWYVAEQHEEEVLFKDILDKIELIGNETHGLYLADQ YVKGIAKSRKSGS | 299 |
| 1B-08-PL with HexaPro + D614G with glycan at N77on Ferritin to fill in gap | pCoV220 | S2P-HexaPro.1158oplx2-del-Ferritin-D614G-N77glyc | | SSQCVNLTTRTQLPPAYTNSFTRGVYYPDKVFRSSVLHSTQDLFLPFFSN V TWFHAIHVSGTNGTKRFDNPVLPFNDGVYFASTEKSNIIRGWIFGTTLDS K TQSLLIVNNATNVVIKVCEFQFCNDPFLGVYYHKNNKSWMESEFRVYSSA NNCTFEYVSQPFLMDLEGKQGNFKNLREFVFKNIDGYFKIYSKHTPINLV R DLPQGFSALEPLVDLPIGINITRFQTLLALHRSYLTPGDSSSGWTAGAAA Y YVGYLQPRTFLLKYNENGTITDAVDCALDPLSETKCTLKSFTVEKGIYQT S NFRVQPTESIVRFPNITNLCPFGEVFNATRFASVYAWNRKRISNCVADYS V LYNSASFSTFKCYGVSPTKLNDLCFTNVYADSFVIRGDEVRQIAPGQTGK I ADYNYKLPDDFTGCVIAWNSNNLDSKVGGNYNYLYRLFRKSNLKPFERD ISTEIYQAGSTPCNGVEGFNCYFPLQSYGFQPTNGVGYQPYRVVVLSFEL L HAPATVCGPKKSTNLVKNKCVNFNFNGLTGTGVLTESNKKFLPFQQFGR DIADTTDAVRDPQTLEILDITPCSFGGVSVITPGTNTSNQVAVLYQGVNC T EVPVAIHADQLTPTWRVYSTGSNVFQTRAGCLIGAEHVNNSYECDIPIGA GICASYQTQTNSPGSASSVASQSIIAYTMSLGAENSVAYSNNSIAIPTNF TIS VTTEILPVSMTKTSVDCTMYICGDSTECSNLLLQYGSFCTQLNRALTGIA V EQDKNTQEVFAQVKQIYKTPPIKDFGGFNFSQILPDPSKPSKRSPIEDLL FN KVTLADAGFIKQYGDCLGDIAARDLICAQKFNGLTVLPPLLTDEMIAQYT SALLAGTITSGWTFGAGPALQIPFPMQMAYRFNGIGVTQNVLYENQKLIA NQFNSAIGKIQDSLSSTPSALGKLQDVVNQNAQALNTLVKQLSSNFGAIS S VLNDILSRLDPPEAEVQIDRLITGRLQSLQTYVTQQLIRAAEIRASANLA AT KMSECVLGQSKRVDFCGKGYHLMSFPQSAPHGVVFLHVTYVPAQEKNFT TAPAICHDGKAHFPREGVFVSNGTHWFVTQRNFYEPQIITTDNTFVSGNC DVVIGIVNNTVYDPLQSELDSIKEELDKIHKNLDSIKEELDKIHKNGSGG SG DIIKLLNEQVNKEMQSSNLYMSMSSWCYTHSLDGAGLFLFDHAAEEYEH AKKLIIFLNENNVPVQLTSISAPNHSFEGLTQIFQKAYEHEQHISESINN IVD HAIKSKDHATFNFLQWYVAEQHEEEVLFKDILDKIELIGNENHGLYLADQ YVKGIAKSRKSGS | 300 |
| | pCoV223 | PrefLead-His8-3c-S2P.1158op1-del-Ferritin-N1158Q | | HHHHHHHHGPLEVLFQGPSSQCVNLTTRTQLPPAYTNSFTRGVYYPDKVF RSSVLHSTQDLFLPFFSNVTWFHAIHVSGTNGTKRFDNPVLPFNDGVYFA S TEKSNIIRGWIFGTTLDSKTQSLLIVNNATNVVIKVCEFQFCNDPFLGVY Y HKNNKSWMESEFRVYSSANNCTFEYVSQPFLMDLEGKQGNFKNLREFVF KNIDGYFKIYSKHTPINLVRDLPQGFSALEPLVDLPIGINITRFQTLLAL HRS YLTPGDSSSGWTAGAAAYYVGYLQPRTFLLKYNENGTITDAVDCALDPL SETKCTLKSFTVEKGIYQTSNFRVQPTESIVRFPNITNLCPFGEVFNATR FA SVYAWNRKRISNCVADYSVLYNSASFSTFKCYGVSPTKLNDLCFTNVYA DSFVIRGDEVRQIAPGQTGKIADYNYKLPDDFTGCVIAWNSNNLDSKVGG NYNYLYRLFRKSNLKPFERDISTEIYQAGSTPCNGVEGFNCYFPLQSYGF Q PTNGVGYQPYRVVVLSFELLHAPATVCGPKKSTNLVKNKCVNFNFNGLT GTGVLTESNKKFLPFQQFGRDIADTTDAVRDPQTLEILDITPCSFGGVSV IT PGTNTSNQVAVLYQDVNCTEVPVAIHADQLTPTWRVYSTGSNVFQTRAG CLIGAEHVNNSYECDIPIGAGICASYQTQTNSPGSASSVASQSIIAYTMS LG AENSVAYSNNSIAIPTNFTISVTTEILPVSMTKTSVDCTMYICGDSTECS NL LLQYGSFCTQLNRALTGIAVEQDKNTQEVFAQVKQIYKTPPIKDFGGFNF S QILPDPSKPSKRSFIEDLLFNKVTLADAGFIKQYGDCLGDIAARDLICAQ KF NGLTVLPPLLTDEMIAQYTSALLAGTITSGWTFGAGAALQIPFAMQMAYR FNGIGVTQNVLYENQKLIANQFNSAIGKIQDSLSSTASALGKLQDVVNQN AQALNTLVKQLSSNFGAISSVLNDILSRLDPPEAEVQIDRLITGRLQSLQ TY VTQQLIRAAEIRASANLAATKMSECVLGQSKRVDFCGKGYHLMSFPQSAP HGVVFLHVTYVPAQEKNFTTAPAICHDGKAHFPREGVFVSNGTHWFVTQ RNFYEPQIITTDNTFVSGNCDVVIGIVNNTVYDPLQSELDSIKEELDKIH KN GSGGSGDIIKLLNEQVNKEMQSSNLYMSMSSWCYTHSLDGAGLFLFDHA AEEYEHAKKLIIFLNENNVPVQLTSISAPEHKFEGLTQIFQKAYEHEQHI SE SINNIVDHAIKSKDHATFNFLQWYVAEQHEEEVLFKDILDKIELIGNENH G LYLADQYVKGIAKSRKSGS | 301 |
| | pCoV-BoS1 | SARS-CoV-2, SARS-CoV-1 HKU-1, MERS-CoV, 229E, | | NITNLCPFGEVFNATRFASVYAWNRKRISNCVADYSVLYNSASFSTFKCY GVSPTKLNDLCFTNVYADSFVIRGDEVRQIAPGQTGKIADYNYKLPDDFT GCVIAWNSNNLDSKVGGNYNYLYRLFRKSNLKPFERDISTEIYQAGSTPC NGVEGFNCYFPLQSYGFQPTNGVGYQPYRVVVLSFELLHAPATVCGGGG S TNLCPFGEVFNATKFPSVYAWERKKISNCVADYSVLYNSTFFSTFKCYGV SATKLNDLCFSNVYADSFVVKGDDVRQIAPGQTGVIADYNYKLPDDFMG CVLAWNTRNIDATSTGNYNYKYRYLRHGKLRPFERDISNVPFSPDGKPCT PPALNCYWPLNDYGFYTTTGIGYQP CGGGGS DCDIDKWLNNFNVPSPLNWERKIFSNCNFNLSTLLRLVHTDSFSCNNFDE S KIYGSCFKSIVLDKFAIPNSRRSDLQLGSSGFLQSSNYKIDTTSSSCQLY YSL PAINVTINNYNPSSWNRRYGFNNFNLSSHSVVYSRYCFSVNNTFCPCAKP S FASSCKSHKPPSASCPIGTNYRSCESTTVLDHTDWCRCSCLPDPITAYDP RS CSQKKSLVGVGEHCAGFGVDEEKCGVLDGSYNVSCLCSTDAFLGWSYDT CVSNNRCNIFSNFILNG CGGGGS EAKPSGSVVEQAEGVECDFSPLLSGTPPQVYNFKRLVFTNCNYNLTKLLS LFSVNDFTCSQISPAAIASNCYSSLILDYFSYPLSMKSDLSVSSAGPISQ FNY KQSFSNPTCLILATVPHNLTTITKPLKYSYINKCSRFLSDDRTEVPQLVN AN QYSPCVSIVPSTVWEDGDYYRKQLSPLEGGGWLVASGSTVAMTEQLQM GFGITVQYGTDTNSVCPK CGGGGS SIVSLPVYHKHTFIVLYVDFKPQSGGGKCFNCYPAGVNITLANFNETKGP L CVDTSHFTTKYVAVYANVG RWSASINTGNCPFSFGKVNNFVKFGSVCFSLKDIPGGCAMPIVANWAYSK YYTIGSLYVSWSDGDGITGV PQPVEGVSS GSGGGGESQVRQQFSKDIEKLLNEQVNKEMQSSNLYMSMSSWCYTHSLD GAGLFLFDHAAEEYEHAKKLIIFLNENNVPVQLTSISAPEHKFEGLTQIF QK AYEHEQHISESINNIVDHAIKSKDHATFNFLQWYVAEQHEEEVLFKDILD K IELIGNENHGLYLADQYVKGIAKSRKSGS | 302 |
| | pCoV-BoS2 | | | TNLCPFGEVFNATKFPSVYAWERKKISNCVADYSVLYNSTFFSTFKCYGV SATKLNDLCFSNVYADSFVVKGDDVRQIAPGQTGVIADYNYKLPDDFMG CVLAWNTRNIDATSTGNYNYKYRYLRHGKLRPFERDISNVPFSPDGKPCT PPALNCYWPLNDYGFYTTTGIGYQP CGGGGS DCDIDKWLNNFNVPSPLNWERKIFSNCNFNLSTLLRLVHTDSFSCNNFDE S KIYGSCFKSIVLDKFAIPNSRRSDLQLGSSGFLQSSNYKIDTTSSSCQLY YSL PAINVTINNYNPSSWNRRYGFNNFNLSSHSVVYSRYCFSVNNTFCPCAKP S FASSCKSHKPPSASCPIGTNYRSCESTTVLDHTDWCRCSCLPDPITAYDP RS CSQKKSLVGVGEHCAGFGVDEEKCGVLDGSYNVSCLCSTDAFLGWSYDT CVSNNRCNIFSNFILNG CGGGGS EAKPSGSVVEQAEGVECDFSPLLSGTPPQVYNFKRLVFTNCNYNLTKLLS LFSVNDFTCSQISPAAIASNCYSSLILDYFSYPLSMKSDLSVSSAGPISQ FNY KQSFSNPTCLILATVPHNLTTITKPLKYSYINKCSRFLSDDRTEVPQLVN AN QYSPCVSIVPSTVWEDGDYYRKQLSPLEGGGWLVASGSTVAMTEQLQM GFGITVQYGTDTNSVCPK CGGGGS SIVSLPVYHKHTFIVLYVDFKPQSGGGKCFNCYPAGVNITLANFNETKGP L CVDTSHFTTKYVAVYANVG RWSASINTGNCPFSFGKVNNFVKFGSVCFSLKDIPGGCAMPIVANWAYSK YYTIGSLYVSWSDGDGITGV PQPVEGVSS NITNLCPFGEVFNATRFASVYAWNRKRISNCVADYSVLYNSASFSTFKCY GVSPTKLNDLCFTNVYADSFVIRGDEVRQIAPGQTGKIADYNYKLPDDFT GCVIAWNSNNLDSKVGGNYNYLYRLFRKSNLKPFERDISTEIYQAGSTPC NGVEGFNCYFPLQSYGFQPTNGVGYQPYRVVVLSFELLHAPATVCGGGG S GSGGGGESQVRQQFSKDIEKLLNEQVNKEMQSSNLYMSMSSWCYTHSLD GAGLFLFDHAAEEYEHAKKLIIFLNENNVPVQLTSISAPEHKFEGLTQIF QK AYEHEQHISESINNIVDHAIKSKDHATFNFLQWYVAEQHEEEVLFKDILD K IELIGNENHGLYLADQYVKGIAKSRKSGS | 303 |
| | pCoV-BoS3 | | | NITNLCPFGEVFNATRFASVYAWNRKRISNCVADYSVLYNSASFSTFKCY GVSPTKLNDLCFTNVYADSFVIRGDEVRQIAPGQTGKIADYNYKLPDDFT GCVIAWNSNNLDSKVGGNYNYLYRLFRKSNLKPFERDISTEIYQAGSTPC NGVEGFNCYFPLQSYGFQPTNGVGYQPYRVVVLSFELLHAPATVCGGGG S TNLCPFGEVFNATKFPSVYAWERKKISNCVADYSVLYNSTFFSTFKCYGV SATKLNDLCFSNVYADSFVVKGDDVRQIAPGQTGVIADYNYKLPDDFMG CVLAWNTRNIDATSTGNYNYKYRYLRHGKLRPFERDISNVPFSPDGKPCT PPALNCYWPLNDYGFYTTTGIGYQP CGGGGS EAKPSGSVVEQAEGVECDFSPLLSGTPPQVYNFKRLVFTNCNYNLTKLLS LFSVNDFTCSQISPAAIASNCYSSLILDYFSYPLSMKSDLSVSSAGPISQ FNY KQSFSNPTCLILATVPHNLTTITKPLKYSYINKCSRFLSDDRTEVPQLVN AN QYSPCVSIVPSTVWEDGDYYRKQLSPLEGGGWLVASGSTVAMTEQLQM GFGITVQYGTDTNSVCPK CGGGGS SIVSLPVYHKHTFIVLYVDFKPQSGGGKCFNCYPAGVNITLANFNETKGP L CVDTSHFTTKYVAVYANVG RWSASINTGNCPFSFGKVNNFVKFGSVCFSLKDIPGGCAMPIVANWAYSK YYTIGSLYVSWSDGDGITGV PQPVEGVSS GSGGGGESQVRQQFSKDIEKLLNEQVNKEMQSSNLYMSMSSWCYTHSLD GAGLFLFDHAAEEYEHAKKLIIFLNENNVPVQLTSISAPEHKFEGLTQIF QK AYEHEQHISESINNIVDHAIKSKDHATFNFLQWYVAEQHEEEVLFKDILD K IELIGNENHGLYLADQYVKGIAKSRKSGS | 304 |
| | pCoV-BoS4 | | | NITNLCPFGEVFNATRFASVYAWNRKRISNCVADYSVLYNSASFSTFKCY GVSPTKLNDLCFTNVYADSFVIRGDEVRQIAPGQTGKIADYNYKLPDDFT GCVIAWNSNNLDSKVGGNYNYLYRLFRKSNLKPFERDISTEIYQAGSTPC NGVEGFNCYFPLQSYGFQPTNGVGYQPYRVVVLSFELLHAPATVCGGGG S DCDIDKWLNNFNVPSPLNWERKIFSNCNFNLSTLLRLVHTDSFSCNNFDE S KIYGSCFKSIVLDKFAIPNSRRSDLQLGSSGFLQSSNYKIDTTSSSCQLY YSL PAINVTINNYNPSSWNRRYGFNNFNLSSHSVVYSRYCFSVNNTFCPCAKP S FASSCKSHKPPSASCPIGTNYRSCESTTVLDHTDWCRCSCLPDPITAYDP RS CSQKKSLVGVGEHCAGFGVDEEKCGVLDGSYNVSCLCSTDAFLGWSYDT CVSNNRCNIFSNFILNG CGGGGS EAKPSGSVVEQAEGVECDFSPLLSGTPPQVYNFKRLVFTNCNYNLTKLLS LFSVNDFTCSQISPAAIASNCYSSLILDYFSYPLSMKSDLSVSSAGPISQ FNY KQSFSNPTCLILATVPHNLTTITKPLKYSYINKCSRFLSDDRTEVPQLVN AN QYSPCVSIVPSTVWEDGDYYRKQLSPLEGGGWLVASGSTVAMTEQLQM GFGITVQYGTDTNSVCPK CGGGGS SIVSLPVYHKHTFIVLYVDFKPQSGGGKCFNCYPAGVNITLANFNETKGP L CVDTSHFTTKYVAVYANVG RWSASINTGNCPFSFGKVNNFVKFGSVCFSLKDIPGGCAMPIVANWAYSK YYTIGSLYVSWSDGDGITGV PQPVEGVSS GSGGGGESQVRQQFSKDIEKLLNEQVNKEMQSSNLYMSMSSWCYTHSLD GAGLFLFDHAAEEYEHAKKLIIFLNENNVPVQLTSISAPEHKFEGLTQIF QK AYEHEQHISESINNIVDHAIKSKDHATFNFLQWYVAEQHEEEVLFKDILD K IELIGNENHGLYLADQYVKGIAKSRKSGS | 305 |
| | pCoV-BoS5 | | | NITNLCPFGEVFNATRFASVYAWNRKRISNCVADYSVLYNSASFSTFKCY GVSPTKLNDLCFTNVYADSFVIRGDEVRQIAPGQTGKIADYNYKLPDDFT GCVIAWNSNNLDSKVGGNYNYLYRLFRKSNLKPFERDISTEIYQAGSTPC NGVEGFNCYFPLQSYGFQPTNGVGYQPYRVVVLSFELLHAPATVCGGGG S TNLCPFGEVFNATKFPSVYAWERKKISNCVADYSVLYNSTFFSTFKCYGV SATKLNDLCFSNVYADSFVVKGDDVRQIAPGQTGVIADYNYKLPDDFMG CVLAWNTRNIDATSTGNYNYKYRYLRHGKLRPFERDISNVPFSPDGKPCT PPALNCYWPLNDYGFYTTTGIGYQP CGGGGS DCDIDKWLNNFNVPSPLNWERKIFSNCNFNLSTLLRLVHTDSFSCNNFDE S KIYGSCFKSIVLDKFAIPNSRRSDLQLGSSGFLQSSNYKIDTTSSSCQLY YSL PAINVTINNYNPSSWNRRYGFNNFNLSSHSVVYSRYCFSVNNTFCPCAKP S FASSCKSHKPPSASCPIGTNYRSCESTTVLDHTDWCRCSCLPDPITAYDP RS CSQKKSLVGVGEHCAGFGVDEEKCGVLDGSYNVSCLCSTDAFLGWSYDT CVSNNRCNIFSNFILNG CGGGGS SIVSLPVYHKHTFIVLYVDFKPQSGGGKCFNCYPAGVNITLANFNETKGP L CVDTSHFTTKYVAVYANVG RWSASINTGNCPFSFGKVNNFVKFGSVCFSLKDIPGGCAMPIVANWAYSK YYTIGSLYVSWSDGDGITGV PQPVEGVSS GSGGGGESQVRQQFSKDIEKLLNEQVNKEMQSSNLYMSMSSWCYTHSLD GAGLFLFDHAAEEYEHAKKLIIFLNENNVPVQLTSISAPEHKFEGLTQIF QK AYEHEQHISESINNIVDHAIKSKDHATFNFLQWYVAEQHEEEVLFKDILD K IELIGNENHGLYLADQYVKGIAKSRKSGS | 306 |
| | pCoV-BoS6 | | | NITNLCPFGEVFNATRFASVYAWNRKRISNCVADYSVLYNSASFSTFKCY GVSPTKLNDLCFTNVYADSFVIRGDEVRQIAPGQTGKIADYNYKLPDDFT GCVIAWNSNNLDSKVGGNYNYLYRLFRKSNLKPFERDISTEIYQAGSTPC NGVEGFNCYFPLQSYGFQPTNGVGYQPYRVVVLSFELLHAPATVCGGGG S TNLCPFGEVFNATKFPSVYAWERKKISNCVADYSVLYNSTFFSTFKCYGV SATKLNDLCFSNVYADSFVVKGDDVRQIAPGQTGVIADYNYKLPDDFMG CVLAWNTRNIDATSTGNYNYKYRYLRHGKLRPFERDISNVPFSPDGKPCT PPALNCYWPLNDYGFYTTTGIGYQP CGGGGS DCDIDKWLNNFNVPSPLNWERKIFSNCNFNLSTLLRLVHTDSFSCNNFDE S KIYGSCFKSIVLDKFAIPNSRRSDLQLGSSGFLQSSNYKIDTTSSSCQLY YSL PAINVTINNYNPSSWNRRYGFNNFNLSSHSVVYSRYCFSVNNTFCPCAKP S FASSCKSHKPPSASCPIGTNYRSCESTTVLDHTDWCRCSCLPDPITAYDP RS CSQKKSLVGVGEHCAGFGVDEEKCGVLDGSYNVSCLCSTDAFLGWSYDT CVSNNRCNIFSNFILNG CGGGGS EAKPSGSVVEQAEGVECDFSPLLSGTPPQVYNFKRLVFTNCNYNLTKLLS LFSVNDFTCSQISPAAIASNCYSSLILDYFSYPLSMKSDLSVSSAGPISQ FNY KQSFSNPTCLILATVPHNLTTITKPLKYSYINKCSRFLSDDRTEVPQLVN AN QYSPCVSIVPSTVWEDGDYYRKQLSPLEGGGWLVASGSTVAMTEQLQM GFGITVQYGTDTNSVCPK GSGGGGESQVRQQFSKDIEKLLNEQVNKEMQSSNLYMSMSSWCYTHSLD GAGLFLFDHAAEEYEHAKKLIIFLNENNVPVQLTSISAPEHKFEGLTQIF QK AYEHEQHISESINNIVDHAIKSKDHATFNFLQWYVAEQHEEEVLFKDILD K IELIGNENHGLYLADQYVKGIAKSRKSGS | 307 |

TABLE 19

Titers for mouse sera in each immunization group, against up to three SARS-CoV-2 coating antigens, (1) RBD, (2) NTD, and (3) S-2P trimer. Values shown are the Arithmetic Mean End Point
Data is shown for Week 2 (2 weeks following 1^{st} immunization), and Week 5 (2 weeks following 2^{nd} immunization) with the exception of the RBD-His immunization group where week 10 and 12 results are shown

| Table 19 Immunogen | Immunogen Design | AH | C57BL/6 mice | | ALFQ | AH | BALB/c mice | | ALFQ | Coating Antigen |
|---|---|---|---|---|---|---|---|---|---|---|
| | | Week 2 | Week 5 | Week 2 | Week 5 | Week 2 | Week 5 | Week 2 | Week 5 | |
| RBD-His | RBD monomer | 1,140 (wk10) | 489 (wk12) | 46,080 (wk10) | 36,800 (wk12) | 1,040 (wk10) | 578 (wk12) | 91,200 (wk10) | 25,600 (wk12) | RBD |
| S-2P | Prefusion stabilized trimer | 9,920 580 520 | 184,320 3,840 2,680 | 40,960 1,280 2,720 | 2,785,280 256,000 40,960 | 3,200 320 280 | 261,12 60,800 4,840 | 7,680 210 580 | 614,400 194,560 40,960 | S-2P RBD NTD |
| pCoV23 | NTD-Ferritin | 1,680 | 7,040 | 4,400 | 56,320 | 760 | 5,120 | 1,440 | 55,040 | NTD |
| pCoV65 | NTD-Ferritin | | | 6,720 25,600 | 16,640 | | | 560 5,775 | 19,200 | S-2P NTD |
| pCoV58 | RBD-Ferritin | 9,920 2133 | | 32,000 970 | 51,200 21,760 | 6,080 2,000 | | 40,960 450 | 48,640 37,120 | S-2P RBD |
| pCoV50 | RBD-Ferritin | | | | | | | 24,320 380 | 102,400 32,000 | S-2P RBD |
| pCoV59 | RBD-Ferritin | | | | | | | 7,360 240 | 171,520 37,120 | S-2P RBD |
| pCoV1B-05 | S-Trimer-Ferritin | | | 69,689 5,486 4,089 | | | | 39,680 880 1360 | | S-2P RBD NTD |
| pCoV1B-05 (50 ug/dose) | S-Trimer-Ferritin | | | 153,600 30,720 10,880 | | | | ND | | S-2P RBD NTD |
| pCoV71 | NTD-His | | | 26,240 | | | | 2,260 | | NTD |
| pCoV122 | RBD-NTD-Ferritin | | | 4,960 6,240 4,340 | | | | 5,440 | | S-2P RBD NTD |
| pCoV111 | S1-Ferritin | | | 71,600 1,520 4,320 | | | | 33,280 2,000 | | S-2P RBD NTD |
| pCoV50+pCo V65 | Co-express RBD-Ferr & NTD-Ferr | | | 32,640 2,240 3,680 | | | | 21,760 2,440 | | S-2P RBD NTD |
| pCoV56+pCo V65 | Co-express RBD-Ferr & NTD-Ferr | | | 6,400 2,880 8640 | | | | 24,040 920 | | S-2P RBD NTD |
| pCoV58+pCo V65 | Co-express RBD-Ferr & NTD-Ferr | | | 87,040 11,600 2,000 | | | | 38,400 2,560 | | S-2P RBD NTD |
| pCoV59+pCo V65 | Co-express RBD-Ferr & NTD-Ferr | | | 56,960 6,720 4,400 | | | | 12,880 2,400 | | S-2P RBD NTD |
| pCoV129 | RBD-Ferritin | 3,520 1,140 | | 3,600 820 | | 2,400 460 | | 5,760 4,578 | | S-2P RBD |
| pCoV130 | RBD-Ferritin | | | | | | | 2,400 620 | | S-2P RBD |
| pCoV131 | RBD-Ferritin | 5,600 2,260 | | 24,178 3,111 | | 4,720 1,120 | | 8,320 1,800 | | S-2P RBD |
| pCoV127 | RBD-Ferritin | <1,600 200 | | 7,040 2,760 | | 800 578 | | 1,733 1,511 | | S-2P RBD |
| pCoV125 | RBD-NTD-Ferritin | | | | | 2,644 1,822 | | 14,133 >2,400 | | S-2P RBD |
| pCoV146 | RBD-NTD-Ferritin | | | 43,520 18,880 20,800 | | | | 17,280 8,320 | | S-2P RBD NTD |
| pCoV147 | RBD-NTD-Ferritin | | | 19,200 10,880 26,880 | | | | | | S-2P RBD NTD |
| *pCoV1B-06-PL | S-Trimer-Ferritin | | | 409,600 200,000 4,640 | | | | 51,200 14,080 | | S-2P RBD NTD |
| AH alone BALB/c | | | | | | 100 100 | 100 100 | 100 100 | 100 100 | S-2P, RBD |
| ALFQ alone BALB/c | | | | | | | | | | |

TABLE 20

VOC RBDs

| Table 20 Construct Name | Sequence | SEQ ID NO: |
|---|---|---|
| RBD-His6-E484K | NITNLCPFGEVFNATRFASVYAWNRKRISNCVADYSVLYNSASFSTFKCY GVSPTKLNDLCFTNVYADSFVIRGD EVRQIAPGQTGKIADYNYKLPDDFTGCVIAWNSNNLDSKVGGNYNYLYRL FRKSNLKPFERDISTEIYQAGSTPC NGVKGFNCYFPLQSYGFQPTNGVGYQPYRVVVLSFELLHAPATVCGPGSH HHHHH | 308 |
| RBD-His6-N501Y | NITNLCPFGEVFNATRFASVYAWNRKRISNCVADYSVLYNSASFSTFKCY GVSPTKLNDLCFTNVYADSFVIRGD EVRQIAPGQTGKIADYNYKLPDDFTGCVIAWNSNNLDSKVGGNYNYLYRL FRKSNLKPFERDISTEIYQAGSTPC NGVEGFNCYFPLQSYGFQPTYGVGYQPYRVVVLSFELLHAPATVCGPGSH HHHHH | 309 |
| RBD-His6-E484K-N501Y | NITNLCPFGEVFNATRFASVYAWNRKRISNCVADYSVLYNSASFSTFKCY GVSPTKLNDLCFTNVYADSFVIRGD EVRQIAPGQTGKIADYNYKLPDDFTGCVIAWNSNNLDSKVGGNYNYLYRL FRKSNLKPFERDISTEIYQAGSTPC NGVKGFNCYFPLQSYGFQPTYGVGYQPYRVVVLSFELLHAPATVCGPGSH HHHHH | 310 |
| RBD-His6-K417N | NITNLCPFGEVFNATRFASVYAWNRKRISNCVADYSVLYNSASFSTFKCY GVSPTKLNDLCFTNVYADSFVIRGD EVRQIAPGQTGNIADYNYKLPDDFTGCVIAWNSNNLDSKVGGNYNYLYRL FRKSNLKPFERDISTEIYQAGSTPC NGVEGFNCYFPLQSYGFQPTNGVGYQPYRVVVLSFELLHAPATVCGPGSH HHHHH | 311 |
| RBD-His6-E484K-N501Y-K417N | NITNLCPFGEVFNATRFASVYAWNRKRISNCVADYSVLYNSASFSTFKCY GVSPTKLNDLCFTNVYADSFVIRGD EVRQIAPGQTGNIADYNYKLPDDFTGCVIAWNSNNLDSKVGGNYNYLYRL FRKSNLKPFERDISTEIYQAGSTPC NGVKGFNCYFPLQSYGFQPTYGVGYQPYRVVVLSFELLHAPATVCGPGSH HHHHH | 312 |

### REFERENCES

[0369] 1. Bai, H., Li, Y., Michael, N.L., Robb, M.L., and Rolland, M. (2019). The breadth of HIV-1 neutralizing antibodies depends on the conservation of key sites in their epitopes. PLoS Comput Biol 15, e1007056.
[0370] 2. Bangaru, S., Lang, S., Schotsaert, M., Vanderven, H.A., Zhu, X., Kose, N., Bombardi, R., Finn, J.A., Kent, S.J., Gilchuk, P., et al. (2019). A Site of Vulnerability on the Influenza Virus Hemagglutinin Head Domain Trimer Interface. Cell 177, 1136-1152 e1118.
[0371] 3. Barber, C.B., D.P. Dobkin, and H. Huhdanpaa (1996). The quickhull algorithm for convex hulls. ACM Transactions on Mathematical Software 22, 469-483.
[0372] 4. Chan, Y.P., Yan, L., Feng, Y.R., and Broder, C.C. (2009). Preparation of recombinant viral glycoproteins for novel and therapeutic antibody discovery. Methods in molecular biology 525, 31-58, xiii.
[0373] 5. Ge, X.Y., Li, J.L., Yang, X.L., Chmura, A.A., Zhu, G., Epstein, J.H., Mazet, J.K., Hu, B., Zhang, W., Peng, C., et al. (2013). Isolation and characterization of a bat SARS-like coronavirus that uses the ACE2 receptor. Nature 503, 535-538.
[0374] 6. Hamelryck, T., and Manderick, B. (2003). PDB file parser and structure class implemented in Python. Bioinformatics 19, 2308-2310.
[0375] 7. Hu, B., Zeng, L.P., Yang, X.L., Ge, X.Y., Zhang, W., Li, B., Xie, J.Z., Shen, X.R., Zhang, Y.Z., Wang, N., et al. (2017). Discovery of a rich gene pool of bat SARS-related coronaviruses provides new insights into the origin of SARS coronavirus. PLoS pathogens 13, e1006698.
[0376] 8. Letko, M., Marzi, A., and Munster, V. (2020). Functional assessment of cell entry and receptor usage for SARS-CoV-2 and other lineage B betacoronaviruses. Nature microbiology.
[0377] 9. Li, F. (2016). Structure, Function, and Evolution of Coronavirus Spike Proteins. Annual review of virology 3, 237-261.
[0378] 10. Lu, R., Zhao, X., Li, J., Niu, P., Yang, B., Wu, H., Wang, W., Song, H., Huang, B., Zhu, N., et al. (2020). Genomic characterisation and epidemiology of 2019 novel coronavirus: implications for virus origins and receptor binding. Lancet 395, 565-574.
[0379] 11. Menachery, V.D., Yount, B.L., Jr., Debbink, K., Agnihothram, S., Gralinski, L.E., Plante, J.A., Graham, R.L., Scobey, T., Ge, X.Y., Donaldson, E.F., et al. (2015). A SARS-like cluster of circulating bat coronaviruses shows potential for human emergence. Nature medicine 21, 1508-1513.
[0380] 12. Munster, V.J., Koopmans, M., van Doremalen, N., van Riel, D., and de Wit, E. (2020). A Novel Coronavirus Emerging in China - Key Questions for Impact Assessment. The New England journal of medicine 382, 692-694.
[0381] 13. ter Meulen, J., van den Brink, E.N., Poon, L.L., Marissen, W.E., Leung, C.S., Cox, F., Cheung, C.Y., Bakker, A.Q., Bogaards, J.A., van Deventer, E., et al. (2006). Human monoclonal antibody combination against SARS coronavirus: synergy and coverage of escape mutants. PLoS Med 3, e237.
[0382] 14. Tian, X., Li, C., Huang, A., Xia, S., Lu, S., Shi, Z., Lu, L., Jiang, S., Yang, Z., Wu, Y., et al. (2020). Potent binding of 2019 novel coronavirus spike protein by a SARS coronavirus-specific human monoclonal antibody. Emerging microbes & infections 9, 382-385.
[0383] 15. Tripp, R.A., Haynes, L.M., Moore, D., Anderson, B., Tamin, A., Harcourt, B.H., Jones, L.P., Yilla, M., Babcock, G.J., Greenough, T., et al. (2005). Monoclonal antibodies to SARS-associated coronavirus (SARS-CoV): Identification of neutralizing and antibodies reactive to S, N, M and E viral proteins. Journal of Virological Methods.
[0384] 16. Wang, L., Shi, W., Chappell, J.D., Joyce, M.G., Zhang, Y., Kanekiyo, M., Becker, M.M., van Doremalen, N., Fischer, R., Wang, N., et al. (2018). Importance of Neutralizing Monoclonal Antibodies Targeting Multiple Antigenic Sites on the Middle East Respiratory Syndrome Coronavirus Spike Glycoprotein To Avoid Neutralization Escape. Journal of virology 92.
[0385] 17. Wang, L., Shi, W., Joyce, M.G., Modjarrad, K., Zhang, Y., Leung, K., Lees, C.R., Zhou, T., Yassine, H.M., Kanekiyo, M., et al. (2015). Evaluation of candidate vaccine approaches for MERS-CoV. Nature communications 6, 7712.
[0386] 18. West, B.R., Moyer, C.L., King, L.B., Fusco, M.L., Milligan, J.C., Hui, S., and Saphire, E.O. (2018). Structural Basis of Pan-Ebolavirus Neutralization by a Human Antibody against a Conserved, yet Cryptic Epitope. mBio 9.
[0387] 19. Wrapp, D., Wang, N., Corbett, K.S., Goldsmith, J.A., Hsieh, C.L., Abiona, O., Graham, B.S., and McLellan, J.S. (2020). Cryo-EM structure of the 2019-nCoV spike in the prefusion conformation. Science.
[0388] 20. Wu, F., Zhao, S., Yu, B., Chen, Y.M., Wang, W., Song, Z.G., Hu, Y., Tao, Z.W., Tian, J.H., Pei, Y.Y., et al. (2020). A new coronavirus associated with human respiratory disease in China. Nature.
[0389] 21. Yan, R., Zhang, Y., Guo, Y., Xia, L., and Zhou, Q. (2020a). Structural basis for the recognition of the 2019-nCoV by human ACE2. BiorXiv.
[0390] 22. Yan, R., Zhang, Y., Li, Y., Xia, L., Guo, Y., and Zhou, Q. (2020b). Structural basis for the recognition of the SARS-CoV-2 by full-length human ACE2. Science.
[0391] 23. Yang, X.L., Hu, B., Wang, B., Wang, M.N., Zhang, Q., Zhang, W., Wu, L.J., Ge, X.Y., Zhang, Y.Z., Daszak, P., et al. (2015). Isolation and Characterization of a Novel Bat Coronavirus Closely Related to the Direct Progenitor of Severe Acute Respiratory Syndrome Coronavirus. Journal of virology 90, 3253-3256.
[0392] 24. Zhou, P., Yang, X.L., Wang, X.G., Hu, B., Zhang, L., Zhang, W., Si, H.R., Zhu, Y., Li, B., Huang, C.L., et al. (2020). A pneumonia outbreak associated with a new coronavirus of probable bat origin. Nature.

What is claimed is:

1. A nanoparticle comprising a fusion protein comprising a nanoparticle-forming peptide and at least one antigenic coronavirus peptide selected from:
a. a receptor-binding domain (RBD) of a coronavirus, or a fragment or variant thereof,
b. an N-terminal domain (NTD) of a coronavirus, or a fragment or variant thereof,
c. an S1 domain of a coronavirus, or a fragment or variant thereof,
d. a stabilized extracellular spike S-2P domain of a coronavirus, or a fragment or variant thereof,
e. a stabilized extracellular spike S domain of a coronavirus, or a fragment or variant thereof, or
f. a stabilized extracellular spike S-trimer of a coronavirus, or a fragment or variant thereof,.

2. (canceled)

3. The nanoparticle of claim 1, wherein the nanoparticle-forming peptide comprises or is Helicobacter pylori ferritin (Hpf) or a fragment or variant thereof.

4. The nanoparticle of claim 1, wherein the nanoparticle-forming peptide comprises an amino acid sequence selected from:
a. ESQVRQQFSKDIEKLLNEQVNKEMQSSNLYMSMSSWCYTHSLDGAGLFLFDHA AEEYEHAKKLIIFLNENNVPVQLTSISAPEHKFEGLTQIFQKAYEHEQHISESINNIV DHAIKSKDHATFNFLQWYVAEQHEEEVLFKDILDKIELIGNENHGLYLADQYVK GIAKSRKSGS or a fragment or variant thereof,
b. DIIKLLNEQVNKEMQSSNLYMSMSSWCYTHSLDGAGLFLFDHAAEEYEHAKKLI IFLNENNVPVQLTSISAPEHKFEGLTQIFQKAYEHEQHISESINNIVDHAIKSKDHA TFNFLQWYVAEQHEEEVLFKDILDKIELIGNENHGLYLADQYVKGIAKSRKSGS or a fragment or variant thereof, and
c. SKDIIKLLNEQVNKEMQSSNLYMSMSSWCYTHSLDGAGLFLFDHAAEEY EHAKKLIIFLNENNVPVQLTSISAPEHKFEGLTQIFQKAYEHEQHISESINNIVDHAI KSKDHATFNFLQWYVAEQHEEEVLFKDILDKIELIGNENHGLYLADQYVKGIAK SRKSGS or a fragment or variant thereof.

5. The nanoparticle of claim 1, wherein the nanoparticle possesses a 4-fold axis or a 3-fold axis.

6. The nanoparticle of claim 1, wherein the antigenic coronavirus peptide is connected to the nanoparticle-forming peptide via a linker.

7. The nanoparticle of claim 6, wherein the linker comprises an amino acid sequence selected from:
a. GSGGGG,
b. GGGG
c. GSGG
d. GGG, and
e. SGG.

8. The nanoparticle of claim 1, wherein the fusion protein comprises 2-10 antigenic coronavirus peptides connected in series, optionally wherein the antigenic coronavirus peptides are connected via peptide linkers.

9. The nanoparticle of claim 1, wherein the antigenic coronavirus peptide is isolated or derived from a coronavirus selected from SARS-CoV-2, human coronavirus OC43 (hCoV-OC43), Middle East respiratory syndrome-related coronavirus (MERS-CoV), severe acute respiratory syndrome-related coronavirus (SARS-CoV-1), HKU-1, 229E, or NL63.

10. The nanoparticle of claim 1, wherein the nanoparticle comprises one or more of:
a. an Hpf or a fragment or variant thereof connected via a peptide linker to an RBD or a fragment or variant thereof,
b. an Hpf or a fragment or variant thereof connected via a peptide linker to an NTD or a fragment or variant thereof,
c. an Hpf or a fragment or variant thereof connected via a peptide linker to an S1 or a fragment or variant thereof,
d. an Hpf or a fragment or variant thereof connected via a peptide linker to a stabilized extracellular spike domain (S-2P) or a fragment or variant thereof,
e. any fusion protein disclosed in Table 3, and
f. any fusion protein disclosed in Table 18.

11-13. (canceled)

14. A vaccine comprising the nanoparticle of claim 1.

15. The vaccine of claim 14, wherein the vaccine further comprises one or more adjuvants selected from ALFQ, alhydrogel, and combinations thereof.

16. A messenger RNA (mRNA) encoding a nanoparticle according to claim 1.

17. A method of treating or preventing a coronavirus infection in a subject in need thereof, comprising administering to a subject in need thereof the nanoparticle according to claim 1, or a vaccine comprising the nanoparticle, or an mRNA encoding the nanoparticle.

18-22. (canceled)

23. The method of claim 17, wherein prior to administering the nanoparticle or vaccine to the subject, the subject is administered a priming dose of a DNA sequence encoding a receptor-binding domain (RBD) of a coronavirus, or a fragment or variant thereof.

24-32. (canceled)

33. A method of screening for binding molecules capable of binding to coronavirus, comprising contacting a binding molecule with a nanoparticle listed in Table 18 to identify a binding molecule that binds to the nanoparticle.

34. A DNA molecule, comprising a sequence encoding a nanoparticle according to claim 1.

35. A DNA molecule, comprising a sequence encoding a receptor receptor-binding domain (RBD) of a coronavirus, or a fragment or variant thereof.

36-39. (canceled)

40. A method of priming an immune response in a subject, comprising administering to a subject a DNA molecule comprising a sequence encoding a receptor receptor-binding domain (RBD) of a coronavirus or a fragment or variant thereof, or a plasmin comprising the DNA molecule that can express the DNA molecule in vivo, prior to administering to the subject the nanoparticle according to claim 1, or a vaccine comprising the nanoparticle, or an mRNA encoding the nanoparticle.

41. (canceled)

42. (canceled)

43. A method of treating or preventing a coronavirus infection in a subject in need thereof, comprising administering to the subject an anti-coronavirus antibody obtained from or cloned from an immunized subject that was administered a nanoparticle according to claim 1, or a vaccine comprising the nanoparticle, or an mRNA encoding the nanoparticle.

44. (canceled)

45. (canceled)

The application's sequence listing, which the Patent Office published only in electronic form, follows.

SEQUENCE LISTING (346 sequences)

SEQ ID NO: 1 - protein, 175 aa, Helicobacter pylori
ESQVRQQFSKDIEKLLNEQVNKEMQSSNLYMSMSSWCYTHSLDGAGLFLFDHAAEEYEHAKKLIIFLNENNVPVQLTSISAPEHKFEGLTQIFQKAYEHEQHISESINNIVDHAIKSKDHATFNFLQWYVAEQHEEEVLFKDILDKIELIGNENHGLYLADQYVKGIAKSRKSGS

SEQ ID NO: 2 - protein, 165 aa, Artificial Sequence
  Description of Artificial Sequence: Synthetic polypeptide
DIIKLLNEQVNKEMQSSNLYMSMSSWCYTHSLDGAGLFLFDHAAEEYEHAKKLIIFLNENNVPVQLTSISAPEHKFEGLTQIFQKAYEHEQHISESINNIVDHAIKSKDHATFNFLQWYVAEQHEEEVLFKDILDKIELIGNENHGLYLADQYVKGIAKSRKSGS

SEQ ID NO: 3 - protein, 167 aa, Artificial Sequence
  Description of Artificial Sequence: Synthetic polypeptide
SKDIIKLLNEQVNKEMQSSNLYMSMSSWCYTHSLDGAGLFLFDHAAEEYEHAKKLIIFLNENNVPVQLTSISAPEHKFEGLTQIFQKAYEHEQHISESINNIVDHAIKSKDHATFNFLQWYVAEQHEEEVLFKDILDKIELIGNENHGLYLADQYVKGIAKSRKSGS

SEQ ID NO: 4 - protein, 154 aa, Artificial Sequence
  Description of Artificial Sequence: Synthetic polypeptide
MQIYEGKLTAEGLRFGIVASRFNHALVDRLVEGAIDAIVRHGGREEDITLVRVPGSWEIPVAAGELARKEDIDAVIAIGVLIRGATPHFDYIASEVSKGLADLSLELRKPITFGVITADTLEQAIERAGTKHGNKGWEAALSAIEMANLFKSLR

SEQ ID NO: 5 - protein, 4 aa, Artificial Sequence
  Description of Artificial Sequence: Synthetic peptide
GSGG

SEQ ID NO: 6 - protein, 6 aa, Artificial Sequence
  Description of Artificial Sequence: Synthetic peptide
GSGGSG

SEQ ID NO: 7 - protein, 42 aa, Artificial Sequence
  Description of Artificial Sequence: Synthetic polypeptide
GSGGEMKQIEDKIEEILSKIYHIENEIARIKKLIGRGSGGSG

SEQ ID NO: 8 - protein, 20 aa, Artificial Sequence
  Description of Artificial Sequence: Synthetic peptide
LDSIKEELDKIHKNGSGGSG

SEQ ID NO: 9 - protein, 20 aa, Artificial Sequence
  Description of Artificial Sequence: Synthetic peptide
IDSIKEEIDKIHKNGSGGSG

SEQ ID NO: 10 - protein, 37 aa, Artificial Sequence
  Description of Artificial Sequence: Synthetic polypeptide
MKQIEDKIEEILSKIYHIENEIARIKKLIGRGSGGSG

SEQ ID NO: 11 - protein, 6 aa, Artificial Sequence
  Description of Artificial Sequence: Synthetic peptide
GSGGGG

SEQ ID NO: 12 - protein, 3 aa, Artificial Sequence
  Description of Artificial Sequence: Synthetic peptide
GSG

SEQ ID NO: 13 - protein, 14 aa, Artificial Sequence
  Description of Artificial Sequence: Synthetic peptide
GSGGSGGSGGSGGG

SEQ ID NO: 14 - protein, 10 aa, Artificial Sequence
  Description of Artificial Sequence: Synthetic peptide
GGGSGGGSGG

SEQ ID NO: 15 - protein, 4 aa, Artificial Sequence
  Description of Artificial Sequence: Synthetic peptide
GGGG

SEQ ID NO: 16 - protein, 3 aa, Artificial Sequence
  Description of Artificial Sequence: Synthetic peptide
GGG

SEQ ID NO: 17 - protein, 3 aa, Artificial Sequence
  Description of Artificial Sequence: Synthetic peptide
SGG

SEQ ID NO: 18 - protein, 1273 aa, Severe acute respiratory syndrome coronavirus 2
MFVFLVLLPLVSSQCVNLTTRTQLPPAYTNSFTRGVYYPDKVFRSSVLHSTQDLFLPFFSNVTWFHAIHVSGTNGTKRFDNPVLPFNDGVYFASTEKSNIIRGWIFGTTLDSKTQSLLIVNNATNVVIKVCEFQFCNDPFLGVYYHKNNKSWMESEFRVYSSANNCTFEYVSQPFLMDLEGKQGNFKNLREFVFKNIDGYFKIYSKHTPINLVRDLPQGFSALEPLVDLPIGINITRFQTLLALHRSYLTPGDSSSGWTAGAAAYYVGYLQPRTFLLKYNENGTITDAVDCALDPLSETKCTLKSFTVEKGIYQTSNFRVQPTESIVRFPNITNLCPFGEVFNATRFASVYAWNRKRISNCVADYSVLYNSASFSTFKCYGVSPTKLNDLCFTNVYADSFVIRGDEVRQIAPGQTGKIADYNYKLPDDFTGCVIAWNSNNLDSKVGGNYNYLYRLFRKSNLKPFERDISTEIYQAGSTPCNGVEGFNCYFPLQSYGFQPTNGVGYQPYRVVVLSFELLHAPATVCGPKKSTNLVKNKCVNFNFNGLTGTGVLTESNKKFLPFQQFGRDIADTTDAVRDPQTLEILDITPCSFGGVSVITPGTNTSNQVAVLYQDVNCTEVPVAIHADQLTPTWRVYSTGSNVFQTRAGCLIGAEHVNNSYECDIPIGAGICASYQTQTNSPRRARSVASQSIIAYTMSLGAENSVAYSNNSIAIPTNFTISVTTEILPVSMTKTSVDCTMYICGDSTECSNLLLQYGSFCTQLNRALTGIAVEQDKNTQEVFAQVKQIYKTPPIKDFGGFNFSQILPDPSKPSKRSFIEDLLFNKVTLADAGFIKQYGDCLGDIAARDLICAQKFNGLTVLPPLLTDEMIAQYTSALLAGTITSGWTFGAGAALQIPFAMQMAYRFNGIGVTQNVLYENQKLIANQFNSAIGKIQDSLSSTASALGKLQDVVNQNAQALNTLVKQLSSNFGAISSVLNDILSRLDKVEAEVQIDRLITGRLQSLQTYVTQQLIRAAEIRASANLAATKMSECVLGQSKRVDFCGKGYHLMSFPQSAPHGVVFLHVTYVPAQEKNFTTAPAICHDGKAHFPREGVFVSNGTHWFVTQRNFYEPQIITTDNTFVSGNCDVVIGIVNNTVYDPLQPELDSFKEELDKYFKNHTSPDVDLGDISGINASVVNIQKEIDRLNEVAKNLNESLIDLQELGKYEQYIKWPWYIWLGFIAGLIAIVMVTIMLCCMTSCCSCLKGCCSCGSCCKFDEDDSEPVLKGVKLHYT

SEQ ID NO: 19 - protein, 197 aa, Severe acute respiratory syndrome coronavirus 2
NITNLCPFGEVFNATRFASVYAWNRKRISNCVADYSVLYNSASFSTFKCYGVSPTKLNDLCFTNVYADSFVIRGDEVRQIAPGQTGKIADYNYKLPDDFTGCVIAWNSNNLDSKVGGNYNYLYRLFRKSNLKPFERDISTEIYQAGSTPCNGVEGFNCYFPLQSYGFQPTNGVGYQPYRVVVLSFELLHAPATVCGP

SEQ ID NO: 20 - protein, 290 aa, Severe acute respiratory syndrome coronavirus 2
QCVNLTTRTQLPPAYTNSFTRGVYYPDKVFRSSVLHSTQDLFLPFFSNVTWFHAIHVSGTNGTKRFDNPVLPFNDGVYFASTEKSNIIRGWIFGTTLDSKTQSLLIVNNATNVVIKVCEFQFCNDPFLGVYYHKNNKSWMESEFRVYSSANNCTFEYVSQPFLMDLEGKQGNFKNLREFVFKNIDGYFKIYSKHTPINLVRDLPQGFSALEPLVDLPIGINITRFQTLLALHRSYLTPGDSSSGWTAGAAAYYVGYLQPRTFLLKYNENGTITDAVDCALDPLSETKCTL

SEQ ID NO: 21 - protein, 663 aa, Severe acute respiratory syndrome coronavirus 2
VNLTTRTQLPPAYTNSFTRGVYYPDKVFRSSVLHSTQDLFLPFFSNVTWFHAIHVSGTNGTKRFDNPVLPFNDGVYFASTEKSNIIRGWIFGTTLDSKTQSLLIVNNATNVVIKVCEFQFCNDPFLGVYYHKNNKSWMESEFRVYSSANNCTFEYVSQPFLMDLEGKQGNFKNLREFVFKNIDGYFKIYSKHTPINLVRDLPQGFSALEPLVDLPIGINITRFQTLLALHRSYLTPGDSSSGWTAGAAAYYVGYLQPRTFLLKYNENGTITDAVDCALDPLSETKCTLKSFTVEKGIYQTSNFRVQPTESIVRFPNITNLCPFGEVFNATRFASVYAWNRKRISNCVADYSVLYNSASFSTFKCYGVSPTKLNDLCFTNVYADSFVIRGDEVRQIAPGQTGKIADYNYKLPDDFTGCVIAWNSNNLDSKVGGNYNYLYRLFRKSNLKPFERDISTEIYQAGSTPCNGVEGFNCYFPLQSYGFQPTNGVGYQPYRVVVLSFELLHAPATVCGPKKSTNLVKNKCVNFNFNGLTGTGVLTESNKKFLPFQQFGRDIADTTDAVRDPQTLEILDITPCSFGGVSVITPGTNTSNQVAVLYQDVNCTEVPVAIHADQLTPTWRVYSTGSNVFQTRAGCLIGAEHVNNSYECDIPIGAGICASYQTQT

SEQ ID NO: 22 - protein, 672 aa, Severe acute respiratory syndrome coronavirus 2
QCVNLTTRTQLPPAYTNSFTRGVYYPDKVFRSSVLHSTQDLFLPFFSNVTWFHAIHVSGTNGTKRFDNPVLPFNDGVYFASTEKSNIIRGWIFGTTLDSKTQSLLIVNNATNVVIKVCEFQFCNDPFLGVYYHKNNKSWMESEFRVYSSANNCTFEYVSQPFLMDLEGKQGNFKNLREFVFKNIDGYFKIYSKHTPINLVRDLPQGFSALEPLVDLPIGINITRFQTLLALHRSYLTPGDSSSGWTAGAAAYYVGYLQPRTFLLKYNENGTITDAVDCALDPLSETKCTLKSFTVEKGIYQTSNFRVQPTESIVRFPNITNLCPFGEVFNATRFASVYAWNRKRISNCVADYSVLYNSASFSTFKCYGVSPTKLNDLCFTNVYADSFVIRGDEVRQIAPGQTGKIADYNYKLPDDFTGCVIAWNSNNLDSKVGGNYNYLYRLFRKSNLKPFERDISTEIYQAGSTPCNGVEGFNCYFPLQSYGFQPTNGVGYQPYRVVVLSFELLHAPATVCGPKKSTNLVKNKCVNFNFNGLTGTGVLTESNKKFLPFQQFGRDIADTTDAVRDPQTLEILDITPCSFGGVSVITPGTNTSNQVAVLYQDVNCTEVPVAIHADQLTPTWRVYSTGSNVFQTRAGCLIGAEHVNNSYECDIPIGAGICASYQTQTNSPRRAR

SEQ ID NO: 23 - protein, 378 aa, Artificial Sequence
  Description of Artificial Sequence: Synthetic polypeptide
NITNLCPFGEVFNATRFASVYAWNRKRISNCVADYSVLYNSASFSTFKCYGVSPTKLNDLCFTNVYADSFVIRGDEVRQIAPGQTGKIADYNYKLPDDFTGCVIAWNSNNLDSKVGGNYNYLYRLFRKSNLKPFERDISTEIYQAGSTPCNGVEGFNCYFPLQSYGFQPTNGVGYQPYRVVVLSFELLHAPATVCGPGSGGGGESQVRQQFSKDIEKLLNEQVNKEMQSSNLYMSMSSWCYTHSLDGAGLFLFDHAAEEYEHAKKLIIFLNENNVPVQLTSISAPEHKFEGLTQIFQKAYEHEQHISESINNIVDHAIKSKDHATFNFLQWYVAEQHEEEVLFKDILDKIELIGNENHGLYLADQYVKGIAKSRKSGS

SEQ ID NO: 24 - protein, 844 aa, Artificial Sequence
  Description of Artificial Sequence: Synthetic polypeptide
VNLTTRTQLPPAYTNSFTRGVYYPDKVFRSSVLHSTQDLFLPFFSNVTWFHAIHVSGTNGTKRFDNPVLPFNDGVYFASTEKSNIIRGWIFGTTLDSKTQSLLIVNNATNVVIKVCEFQFCNDPFLGVYYHKNNKSWMESEFRVYSSANNCTFEYVSQPFLMDLEGKQGNFKNLREFVFKNIDGYFKIYSKHTPINLVRDLPQGFSALEPLVDLPIGINITRFQTLLALHRSYLTPGDSSSGWTAGAAAYYVGYLQPRTFLLKYNENGTITDAVDCALDPLSETKCTLKSFTVEKGIYQTSNFRVQPTESIVRFPNITNLCPFGEVFNATRFASVYAWNRKRISNCVADYSVLYNSASFSTFKCYGVSPTKLNDLCFTNVYADSFVIRGDEVRQIAPGQTGKIADYNYKLPDDFTGCVIAWNSNNLDSKVGGNYNYLYRLFRKSNLKPFERDISTEIYQAGSTPCNGVEGFNCYFPLQSYGFQPTNGVGYQPYRVVVLSFELLHAPATVCGPKKSTNLVKNKCVNFNFNGLTGTGVLTESNKKFLPFQQFGRDIADTTDAVRDPQTLEILDITPCSFGGVSVITPGTNTSNQVAVLYQDVNCTEVPVAIHADQLTPTWRVYSTGSNVFQTRAGCLIGAEHVNNSYECDIPIGAGICASYQTQTGSGGGGESQVRQQFSKDIEKLLNEQVNKEMQSSNLYMSMSSWCYTHSLDGAGLFLFDHAAEEYEHAKKLIIFLNENNVPVQLTSISAPEHKFEGLTQIFQKAYEHEQHISESINNIVDHAIKSKDHATFNFLQWYVAEQHEEEVLFKDILDKIELIGNENHGLYLADQYVKGIAKSRKSGS

SEQ ID NO: 25 - protein, 396 aa, Artificial Sequence
  Description of Artificial Sequence: Synthetic polypeptide
HHHHHHHHGPLEVLFQGPNITNLCPFGEVFNATRFASVYAWNRKRISNCVADYSVLYNSASFSTFKCYGVSPTKLNDLCFTNVYADSFVIRGDEVRQIAPGQTGKIADYNYKLPDDFTGCVIAWNSNNLDSKVGGNYNYLYRLFRKSNLKPFERDISTEIYQAGSTPCNGVEGFNCYFPLQSYGFQPTNGVGYQPYRVVVLSFELLHAPATVCGPGSGGGGESQVRQQFSKDIEKLLNEQVNKEMQSSNLYMSMSSWCYTHSLDGAGLFLFDHAAEEYEHAKKLIIFLNENNVPVQLTSISAPEHKFEGLTQIFQKAYEHEQHISESINNIVDHAIKSKDHATFNFLQWYVAEQHEEEVLFKDILDKIELIGNENHGLYLADQYVKGIAKSRKSGS

SEQ ID NO: 26 - protein, 862 aa, Artificial Sequence
  Description of Artificial Sequence: Synthetic polypeptide
HHHHHHHHGPLEVLFQGPVNLTTRTQLPPAYTNSFTRGVYYPDKVFRSSVLHSTQDLFLPFFSNVTWFHAIHVSGTNGTKRFDNPVLPFNDGVYFASTEKSNIIRGWIFGTTLDSKTQSLLIVNNATNVVIKVCEFQFCNDPFLGVYYHKNNKSWMESEFRVYSSANNCTFEYVSQPFLMDLEGKQGNFKNLREFVFKNIDGYFKIYSKHTPINLVRDLPQGFSALEPLVDLPIGINITRFQTLLALHRSYLTPGDSSSGWTAGAAAYYVGYLQPRTFLLKYNENGTITDAVDCALDPLSETKCTLKSFTVEKGIYQTSNFRVQPTESIVRFPNITNLCPFGEVFNATRFASVYAWNRKRISNCVADYSVLYNSASFSTFKCYGVSPTKLNDLCFTNVYADSFVIRGDEVRQIAPGQTGKIADYNYKLPDDFTGCVIAWNSNNLDSKVGGNYNYLYRLFRKSNLKPFERDISTEIYQAGSTPCNGVEGFNCYFPLQSYGFQPTNGVGYQPYRVVVLSFELLHAPATVCGPKKSTNLVKNKCVNFNFNGLTGTGVLTESNKKFLPFQQFGRDIADTTDAVRDPQTLEILDITPCSFGGVSVITPGTNTSNQVAVLYQDVNCTEVPVAIHADQLTPTWRVYSTGSNVFQTRAGCLIGAEHVNNSYECDIPIGAGICASYQTQTGSGGGGESQVRQQFSKDIEKLLNEQVNKEMQSSNLYMSMSSWCYTHSLDGAGLFLFDHAAEEYEHAKKLIIFLNENNVPVQLTSISAPEHKFEGLTQIFQKAYEHEQHISESINNIVDHAIKSKDHATFNFLQWYVAEQHEEEVLFKDILDKIELIGNENHGLYLADQYVKGIAKSRKSGS

SEQ ID NO: 27 - protein, 375 aa, Artificial Sequence
  Description of Artificial Sequence: Synthetic polypeptide
NLCPFGEVFNATRFASVYAWNRKRISNCVADYSVLYNSASFSTFKCYGVSPTKLNDLCFTNVYADSFVIRGDEVRQIAPGQTGKIADYNYKLPDDFTGCVIAWNSNNLDSKVGGNYNYLYRLFRKSNLKPFERDISTEIYQAGSTPCNGVEGFNCYFPLQSYGFQPTNGVGYQPYRVVVLSFELLHAPATVCGPGSGGGGESQVRQQFSKDIEKLLNEQVNKEMQSSNLYMSMSSWCYTHSLDGAGLFLFDHAAEEYEHAKKLIIFLNENNVPVQLTSISAPEHKFEGLTQIFQKAYEHEQHISESINNIVDHAIKSKDHATFNFLQWYVAEQHEEEVLFKDILDKIELIGNENHGLYLADQYVKGIAKSRKSGS

SEQ ID NO: 28 - protein, 393 aa, Artificial Sequence
  Description of Artificial Sequence: Synthetic polypeptide
HHHHHHHHGPLEVLFQGPNITNLCPFGEVFNATRFASVYAWNRKRISNCVADYSVLYNSASFSTFKCYGVSPTKLNDLCFTNVYADSFVIRGDEVRQIAPGQTGKIADYNYKLPDDFTGCVIAWNSNNLDSKVGGNYNYLYRLFRKSNLKPFERDISTEIYQAGSTPCNGVEGFNCYFPLQSYGFQPTNGVGYQPYRVVVLSFELLHAPATVCGPGSGESQVRQQFSKDIEKLLNEQVNKEMQSSNLYMSMSSWCYTHSLDGAGLFLFDHAAEEYEHAKKLIIFLNENNVPVQLTSISAPEHKFEGLTQIFQKAYEHEQHISESINNIVDHAIKSKDHATFNFLQWYVAEQHEEEVLFKDILDKIELIGNENHGLYLADQYVKGIAKSRKSGS

SEQ ID NO: 29 - protein, 393 aa, Artificial Sequence
  Description of Artificial Sequence: Synthetic polypeptide
HHHHHHHHGPLEVLFQGPNLCPFGEVFNATRFASVYAWNRKRISNCVADYSVLYNSASFSTFKCYGVSPTKLNDLCFTNVYADSFVIRGDEVRQIAPGQTGKIADYNYKLPDDFTGCVIAWNSNNLDSKVGGNYNYLYRLFRKSNLKPFERDISTEIYQAGSTPCNGVEGFNCYFPLQSYGFQPTNGVGYQPYRVVVLSFELLHAPATVCGPGSGGGGESQVRQQFSKDIEKLLNEQVNKEMQSSNLYMSMSSWCYTHSLDGAGLFLFDHAAEEYEHAKKLIIFLNENNVPVQLTSISAPEHKFEGLTQIFQKAYEHEQHISESINNIVDHAIKSKDHATFNFLQWYVAEQHEEEVLFKDILDKIELIGNENHGLYLADQYVKGIAKSRKSGS

SEQ ID NO: 30 - protein, 375 aa, Artificial Sequence
  Description of Artificial Sequence: Synthetic polypeptide
HHHHHHHHGPLEVLFQGPNITNLCPFGEVFNATRFASVYAWNRKRISNCVADYSVLYNSASFSTFKCYGVSPTKLNDLCFTNVYADSFVIRGDEVRQIAPGQTGKIADYNYKLPDDFTGCVIAWNSNNLDSKVGGNYNYLYRLFRKSNLKPFERDISTEIYQAGSTPCNGVEGFNCYFPLQSYGFQPTNGVGYQPYRVVVLSFELLHAPATVCGPGSGGGGMQIYEGKLTAEGLRFGIVASRFNHALVDRLVEGAIDAIVRHGGREEDITLVRVPGSWEIPVAAGELARKEDIDAVIAIGVLIRGATPHFDYIASEVSKGLADLSLELRKPITFGVITADTLEQAIERAGTKHGNKGWEAALSAIEMANLFKSLR

SEQ ID NO: 31 - protein, 414 aa, Artificial Sequence
  Description of Artificial Sequence: Synthetic polypeptide
MQIYEGKLTAEGLRFGIVASRFNHALVDRLVEGAIDAIVRHGGREEDITLVRVPGSWEIPVAAGELARKEDIDAVIAIGVLIRGATPHFDYIASEVSKGLADLSLELRKPITFGVITADTLEQAIERAGTKHGNKGWEAALSAIEMANLFKSLRGGSGGSGGSGGSGGGNITNLCPFGEVFNATRFASVYAWNRKRISNCVADYSVLYNSASFSTFKCYGVSPTKLNDLCFTNVYADSFVIRGDEVRQIAPGQTGKIADYNYKLPDDFTGCVIAWNSNNLDSKVGGNYNYLYRLFRKSNLKPFERDISTEIYQAGSTPCNGVEGFNCYFPLQSYGFQPTNGVGYQPYRVVVLSFELLHAPATVCGPLEVLFQGPSAWSHPQFEKGGGSGGGSGGSAWSHPQFEKGSHHHHHHHH

SEQ ID NO: 32 - protein, 487 aa, Artificial Sequence
  Description of Artificial Sequence: Synthetic polypeptide
HHHHHHHHGPLEVLFQGPVNLTTRTQLPPAYTNSFTRGVYYPDKVFRSSVLHSTQDLFLPFFSNVTWFHAIHVSGTNGTKRFDNPVLPFNDGVYFASTEKSNIIRGWIFGTTLDSKTQSLLIVNNATNVVIKVCEFQFCNDPFLGVYYHKNNKSWMESEFRVYSSANNCTFEYVSQPFLMDLEGKQGNFKNLREFVFKNIDGYFKIYSKHTPINLVRDLPQGFSALEPLVDLPIGINITRFQTLLALHRSYLTPGDSSSGWTAGAAAYYVGYLQPRTFLLKYNENGTITDAVDCALDPLSETKCTLGSGGGGESQVRQQFSKDIEKLLNEQVNKEMQSSNLYMSMSSWCYTHSLDGAGLFLFDHAAEEYEHAKKLIIFLNENNVPVQLTSISAPEHKFEGLTQIFQKAYEHEQHISESINNIVDHAIKSKDHATFNFLQWYVAEQHEEEVLFKDILDKIELIGNENHGLYLADQYVKGIAKSRKSGS

SEQ ID NO: 33 - protein, 393 aa, Artificial Sequence
  Description of Artificial Sequence: Synthetic polypeptide
HHHHHHHHGPLEVLFQGPNITNLCPFGEVFNATRFASVYAWNRKRISNCVADYSVLYNSASFSTFKCYGVSPTKLNDLCFTNVYADSFVIRGDEVRQIAPGQTGKIADYNYKLPDDFTGCVIAWNSNNLDSKVGGNYNYLYRLFRKSNLKPFERDISTEIYQAGSTPCNGVEGFNCYFPLQSYGFQPTNGVGYQPYRVVVLSFELLHAPATVCGGSGGESQVRQQFSKDIEKLLNEQVNKEMQSSNLYMSMSSWCYTHSLDGAGLFLFDHAAEEYEHAKKLIIFLNENNVPVQLTSISAPEHKFEGLTQIFQKAYEHEQHISESINNIVDHAIKSKDHATFNFLQWYVAEQHEEEVLFKDILDKIELIGNENHGLYLADQYVKGIAKSRKSGS

SEQ ID NO: 34 - protein, 383 aa, Artificial Sequence
  Description of Artificial Sequence: Synthetic polypeptide
HHHHHHHHGPLEVLFQGPNITNLCPFGEVFNATRFASVYAWNRKRISNCVADYSVLYNSASFSTFKCYGVSPTKLNDLCFTNVYADSFVIRGDEVRQIAPGQTGKIADYNYKLPDDFTGCVIAWNSNNLDSKVGGNYNYLYRLFRKSNLKPFERDISTEIYQAGSTPCNGVEGFNCYFPLQSYGFQPTNGVGYQPYRVVVLSFELLHAPATVCGGSGGDIIKLLNEQVNKEMQSSNLYMSMSSWCYTHSLDGAGLFLFDHAAEEYEHAKKLIIFLNENNVPVQLTSISAPEHKFEGLTQIFQKAYEHEQHISESINNIVDHAIKSKDHATFNFLQWYVAEQHEEEVLFKDILDKIELIGNENHGLYLADQYVKGIAKSRKSGS

SEQ ID NO: 35 - protein, 388 aa, Artificial Sequence
  Description of Artificial Sequence: Synthetic polypeptide
HHHHHHHHGPLEVLFQGPNITNLCPFGEVFNATRFASVYAWNRKRISNCVADYSVLYNSASFSTFKCYGVSPTKLNDLCFTNVYADSFVIRGDEVRQIAPGQTGKIADYNYKLPDDFTGCVIAWNSNNLDSKVGGNYNYLYRLFRKSNLKPFERDISTEIYQAGSTPCNGVEGFNCYFPLQSYGFQPTNGVGYQPYRVVVLSFELLHAPATVCGGGSGGGGSKDIIKLLNEQVNKEMQSSNLYMSMSSWCYTHSLDGAGLFLFDHAAEEYEHAKKLIIFLNENNVPVQLTSISAPEHKFEGLTQIFQKAYEHEQHISESINNIVDHAIKSKDHATFNFLQWYVAEQHEEEVLFKDILDKIELIGNENHGLYLADQYVKGIAKSRKSGS

SEQ ID NO: 36 - protein, 472 aa, Artificial Sequence
  Description of Artificial Sequence: Synthetic polypeptide
HHHHHHHHGPLEVLFQGPRVQPTESIVRFPNITNLCPFGEVFNATRFASVYAWNRKRISNCVADYSVLYNSASFSTFKCYGVSPTKLNDLCFTNVYADSFVIRGDEVRQIAPGQTGKIADYNYKLPDDFTGCVIAWNSNNLDSKVGGNYNYLYRLFRKSNLKPFERDISTEIYQAGSTPCNGVEGFNCYFPLQSYGFQPTNGVGYQPYRVVVLSFELLHAPATVCGPKKSTNLVKNKCVNFNFNGLTGTGVLTESNKKFLPFQQFGRDIADTTDAVRDPQTLEILDITPCSGSGGGGESQVRQQFSKDIEKLLNEQVNKEMQSSNLYMSMSSWCYTHSLDGAGLFLFDHAAEEYEHAKKLIIFLNENNVPVQLTSISAPEHKFEGLTQIFQKAYEHEQHISESINNIVDHAIKSKDHATFNFLQWYVAEQHEEEVLFKDILDKIELIGNENHGLYLADQYVKGIAKSRKSGS

SEQ ID NO: 37 - protein, 175 aa, Artificial Sequence; identical to SEQ ID NO: 1
  Description of Artificial Sequence: Synthetic polypeptide

SEQ ID NO: 38 - protein, 466 aa, Artificial Sequence
  Description of Artificial Sequence: Synthetic polypeptide
HHHHHHHHGPLEVLFQGPVNLTTRTQLPPAYTNSFTRGVYYPDKVFRSSVLHSTQDLFLPFFSNVTWFHAIHVSGTNGTKRFDNPVLPFNDGVYFASTEKSNIIRGWIFGTTLDSKTQSLLIVNNATNVVIKVCEFQFCNDPFLGVYYHKNNKSWMESEFRVYSSANNCTFEYVSQPFLMDLEGKQGNFKNLREFVFKNIDGYFKIYSKHTPINLVRDLPQGFSALEPLVDLPIGINITRFQTLLALHRSYLTPGDSSSGWTAGAAAYYVGYLQPRTFLLKYNENGTITDAVDCALDPLSETKCTLGSGGGGMQIYEGKLTAEGLRFGIVASRFNHALVDRLVEGAIDAIVRHGGREEDITLVRVPGSWEIPVAAGELARKEDIDAVIAIGVLIRGATPHFDYIASEVSKGLADLSLELRKPITFGVITADTLEQAIERAGTKHGNKGWEAALSAIEMANLFKSLR

SEQ ID NO: 39 - protein, 475 aa, Artificial Sequence
  Description of Artificial Sequence: Synthetic polypeptide
MQIYEGKLTAEGLRFGIVASRFNHALVDRLVEGAIDAIVRHGGREEDITLVRVPGSWEIPVAAGELARKEDIDAVIAIGVLIRGATPHFDYIASEVSKGLADLSLELRKPITFGVITADTLEQAIERAGTKHGNKGWEAALSAIEMANLFKSLRGGSGGSGGSGGSGGGVNLTTRTQLPPAYTNSFTRGVYYPDKVFRSSVLHSTQDLFLPFFSNVTWFHAIHVSGTNGTKRFDNPVLPFNDGVYFASTEKSNIIRGWIFGTTLDSKTQSLLIVNNATNVVIKVCEFQFCNDPFLGVYYHKNNKSWMESEFRVYSSANNCTFEYVSQPFLMDLEGKQGNFKNLREFVFKNIDGYFKIYSKHTPINLVRDLPQGFSALEPLVDLPIGINITRFQTLLALHRSYLTPGDSSSGWTAGAAAYYVGYLQPRTFLLKYNENGTITDAVDCALDPLSETKCTLGSLEVLFQGPHHHHHHHH

SEQ ID NO: 40 - protein, 375 aa, Artificial Sequence
  Description of Artificial Sequence: Synthetic polypeptide
NITNLCPFGEVFNATRFASVYAWNRKRISNCVADYSVLYNSASFSTFKCYGVSPTKLNDLCFTNVYADSFVIRGDEVRQIAPGQTGKIADYNYKLPDDFTGCVIAWNSNNLDSKVGGNYNYLYRLFRKSNLKPFERDISTEIYQAGSTPCNGVEGFNCYFPLQSYGFQPTNGVGYQPYRVVVLSFELLHAPATVCGGSGGESQVRQQFSKDIEKLLNEQVNKEMQSSNLYMSMSSWCYTHSLDGAGLFLFDHAAEEYEHAKKLIIFLNENNVPVQLTSISAPEHKFEGLTQIFQKAYEHEQHISESINNIVDHAIKSKDHATFNFLQWYVAEQHEEEVLFKDILDKIELIGNENHGLYLADQYVKGIAKSRKSGS

SEQ ID NO: 41 - protein, 365 aa, Artificial Sequence
  Description of Artificial Sequence: Synthetic polypeptide
NITNLCPFGEVFNATRFASVYAWNRKRISNCVADYSVLYNSASFSTFKCYGVSPTKLNDLCFTNVYADSFVIRGDEVRQIAPGQTGKIADYNYKLPDDFTGCVIAWNSNNLDSKVGGNYNYLYRLFRKSNLKPFERDISTEIYQAGSTPCNGVEGFNCYFPLQSYGFQPTNGVGYQPYRVVVLSFELLHAPATVCGGSGGDIIKLLNEQVNKEMQSSNLYMSMSSWCYTHSLDGAGLFLFDHAAEEYEHAKKLIIFLNENNVPVQLTSISAPEHKFEGLTQIFQKAYEHEQHISESINNIVDHAIKSKDHATFNFLQWYVAEQHEEEVLFKDILDKIELIGNENHGLYLADQYVKGIAKSRKSGS

SEQ ID NO: 42 - protein, 464 aa, Artificial Sequence
  Description of Artificial Sequence: Synthetic polypeptide
HHHHHHHHGPLEVLFQGPRVQPTESIVRFPNITNLCPFGEVFNATRFASVYAWNRKRISNCVADYSVLYNSASFSTFKCYGVSPTKLNDLCFTNVYADSFVIRGDEVRQIAPGQTGKIADYNYKLPDDFTGCVIAWNSNNLDSKVGGNYNYLYRLFRKSNLKPFERDISTEIYQAGSTPCNGVEGFNCYFPLQSYGFQPTNGVGYQPYRVVVLSFELLHAPATVCGPKKSTNLVKNKCVNFNFNGLTGTGVLTESNKKFLPFQQFGRDIADTTDAVRDPQTLEILDITPCSGSGGGGSKDIIKLLNEQVNKEMQSSNLYMSMSSWCYTHSLDGAGLFLFDHAAEEYEHAKKLIIFLNENNVPVQLTSISAPEHKFEGLTQIFQKAYEHEQHISESINNIVDHAIKSKDHATFNFLQWYVAEQHEEEVLFKDILDKIELIGNENHGLYLADQYVKGIAKSRKSGS

SEQ ID NO: 43 - protein, 409 aa, Artificial Sequence
  Description of Artificial Sequence: Synthetic polypeptide
HHHHHHHHGPLEVLFQGPNITNLCPFGEVFNATRFASVYAWNRKRISNCVADYSVLYNSASFSTFKCYGVSPTKLNDLCFTNVYADSFVIRGDEVRQIAPGQTGKIADYNYKLPDDFTGCVIAWNSNNLDSKVGGNYNYLYRLFRKSNLKPFERDISTEIYQAGSTPCNGVEGFNCYFPLQSYGFQPTNGVGYQPYRVVVLSFELLHAPATVCGGSGGPPPPPPPPPPGSGGGGESQVRQQFSKDIEKLLNEQVNKEMQSSNLYMSMSSWCYTHSLDGAGLFLFDHAAEEYEHAKKLIIFLNENNVPVQLTSISAPEHKFEGLTQIFQKAYEHEQHISESINNIVDHAIKSKDHATFNFLQWYVAEQHEEEVLFKDILDKIELIGNENHGLYLADQYVKGIAKSRKSGS

SEQ ID NO: 44 - protein, 410 aa, Artificial Sequence
  Description of Artificial Sequence: Synthetic polypeptide
HHHHHHHHGPLEVLFQGPNITNLCPFGEVFNATRFASVYAWNRKRISNCVADYSVLYNSASFSTFKCYGVSPTKLNDLCFTNVYADSFVIRGDEVRQIAPGQTGKIADYNYKLPDDFTGCVIAWNSNNLDSKVGGNYNYLYRLFRKSNLKPFERDISTEIYQAGSTPCNGVEGFNCYFPLQSYGFQPTNGVGYQPYRVVVLSFELLHAPATVCGGSGGEKDSHKEEKDSHKGSGGESQVRQQFSKDIEKLLNEQVNKEMQSSNLYMSMSSWCYTHSLDGAGLFLFDHAAEEYEHAKKLIIFLNENNVPVQLTSISAPEHKFEGLTQIFQKAYEHEQHISESINNIVDHAIKSKDHATFNFLQWYVAEQHEEEVLFKDILDKIELIGNENHGLYLADQYVKGIAKSRKSGS

SEQ ID NO: 45 - protein, 412 aa, Artificial Sequence
  Description of Artificial Sequence: Synthetic polypeptide
HHHHHHHHGPLEVLFQGPNITNLCPFGEVFNATRFASVYAWNRKRISNCVADYSVLYNSASFSTFKCYGVSPTKLNDLCFTNVYADSFVIRGDEVRQIAPGQTGKIADYNYKLPDDFTGCVIAWNSNNLDSKVGGNYNYLYRLFRKSNLKPFERDISTEIYQAGSTPCNGVEGFNCYFPLQSYGFQPTNGVGYQPYRVVVLSFELLHAPATVCGGSGGEDNAQHTSADNEATKGSGGESQVRQQFSKDIEKLLNEQVNKEMQSSNLYMSMSSWCYTHSLDGAGLFLFDHAAEEYEHAKKLIIFLNENNVPVQLTSISAPEHKFEGLTQIFQKAYEHEQHISESINNIVDHAIKSKDHATFNFLQWYVAEQHEEEVLFKDILDKIELIGNENHGLYLADQYVKGIAKSRKSGS

SEQ ID NO: 46 - protein, 423 aa, Artificial Sequence
  Description of Artificial Sequence: Synthetic polypeptide
HHHHHHHHGPLEVLFQGPNITNLCPFGEVFNATRFASVYAWNRKRISNCVADYSVLYNSASFSTFKCYGVSPTKLNDLCFTNVYADSFVIRGDEVRQIAPGQTGKIADYNYKLPDDFTGCVIAWNSNNLDSKVGGNYNYLYRLFRKSNLKPFERDISTEIYQAGSTPCNGVEGFNCYFPLQSYGFQPTNGVGYQPYRVVVLSFELLHAPATVCGGSGSGGEMKQIEDKIEEILSKIYHIENEIARIKKLIGRGSGGSGDIIKLLNEQVNKEMQSSNLYMSMSSWCYTHSLDGAGLFLFDHAAEEYEHAKKLIIFLNENNVPVQLTSISAPEHKFEGLTQIFQKAYEHEQHISESINNIVDHAIKSKDHATFNFLQWYVAEQHEEEVLFKDILDKIELIGNENHGLYLADQYVKGIAKSRKSGS

SEQ ID NO: 47 - protein, 406 aa, Artificial Sequence
  Description of Artificial Sequence: Synthetic polypeptide
HHHHHHHHGPLEVLFQGPNITNLCPFGEVFNATRFASVYAWNRKRISNCVADYSVLYNSASFSTFKCYGVSPTKLNDLCFTNVYADSFVIRGDEVRQIAPGQTGKIADYNYKLPDDFTGCVIAWNSNNLDSKVGGNYNYLYRLFRKSNLKPFERDISTEIYQAGSTPCNGVEGFNCYFPLQSYGFQPTNGVGYQPYRVVVLSFELLHAPATVCGGSGSGGELQSELDSIKEELDKGSGGSGDIIKLLNEQVNKEMQSSNLYMSMSSWCYTHSLDGAGLFLFDHAAEEYEHAKKLIIFLNENNVPVQLTSISAPEHKFEGLTQIFQKAYEHEQHISESINNIVDHAIKSKDHATFNFLQWYVAEQHEEEVLFKDILDKIELIGNENHGLYLADQYVKGIAKSRKSGS

SEQ ID NO: 48 - protein, 424 aa, Artificial Sequence
  Description of Artificial Sequence: Synthetic polypeptide
HHHHHHHHGPLEVLFQGPNITNLCPFGEVFNATRFASVYAWNRKRISNCVADYSVLYNSASFSTFKCYGVSPTKLNDLCFTNVYADSFVIRGDEVRQIAPGQTGKIADYNYKLPDDFTGCVIAWNSNNLDSKVGGNYNYLYRLFRKSNLKPFERDISTEIYQAGSTPCNGVEGFNCYFPLQSYGFQPTNGVGYQPYRVVVLSFELLHAPATVCGGSGSGGELQSELDSIKEELDKIHKNLDSIKEELDKIHKNGSGGSGDIIKLLNEQVNKEMQSSNLYMSMSSWCYTHSLDGAGLFLFDHAAEEYEHAKKLIIFLNENNVPVQLTSISAPEHKFEGLTQIFQKAYEHEQHISESINNIVDHAIKSKDHATFNFLQWYVAEQHEEEVLFKDILDKIELIGNENHGLYLADQYVKGIAKSRKSGS

SEQ ID NO: 49 - protein, 396 aa, Artificial Sequence
  Description of Artificial Sequence: Synthetic polypeptide
HHHHHHHHGPLEVLFQGPNITNLCPFGEVFNATRFASVYAWNRKRISNCVADYSVLYNSASFSTFKCYGVSPTKLNDLCFTNVYADSFVIRGDEVRQIAPGQTGKIADYNYKLPDDFTGCVIAWNSNNLDSKVGGNYNYLYRLNRTSNLKPFERDISTEIYQAGSTPCNGVEGFNCYFPLQSYGFQPTNGVGYQPYRVVVLSFELLHAPATVCGPGSGGGGESQVRQQFSKDIEKLLNEQVNKEMQSSNLYMSMSSWCYTHSLDGAGLFLFDHAAEEYEHAKKLIIFLNENNVPVQLTSISAPEHKFEGLTQIFQKAYEHEQHISESINNIVDHAIKSKDHATFNFLQWYVAEQHEEEVLFKDILDKIELIGNENHGLYLADQYVKGIAKSRKSGS

SEQ ID NO: 50 - protein, 396 aa, Artificial Sequence
  Description of Artificial Sequence: Synthetic polypeptide
HHHHHHHHGPLEVLFQGPNITNLCPFGEVFNATRFASVYAWNRKRISNCVADYSVLYNSASFSTFKCYGVSPTKLNDLCFTNVYADSFVIRGDEVRQIAPGQTGKIADYNYKLPDDFTGCVIAWNSNNLDSKVGGNKNYLYRRFRKSNLKPFERDISTEIYQAGSTPCNGVEGFNCYRPLQSYGFQPTNGVGYQPYRVVVLSFELLHAPATVCGPGSGGGGESQVRQQFSKDIEKLLNEQVNKEMQSSNLYMSMSSWCYTHSLDGAGLFLFDHAAEEYEHAKKLIIFLNENNVPVQLTSISAPEHKFEGLTQIFQKAYEHEQHISESINNIVDHAIKSKDHATFNFLQWYVAEQHEEEVLFKDILDKIELIGNENHGLYLADQYVKGIAKSRKSGS

SEQ ID NO: 51 - protein, 396 aa, Artificial Sequence
  Description of Artificial Sequence: Synthetic polypeptide
HHHHHHHHGPLEVLFQGPNITNLCPFGEVFNATRFASVYAWNRKRISNCVADYSVLYNSASFSTFKCYGVSPTKLNDLCFTNVYADSFVIRGDEVRQIAPGQTGKIADYNYKLPDDFTGCVIAWNSNNLDSKVGGNYNYLYRRFRKSNLKPFERDISTEIYQAGSTPCNGVEGFNCYFPLQSYGFQPTNGVGYQPYRVVVLSFELLHAPATVCGPGSGGGGESQVRQQFSKDIEKLLNEQVNKEMQSSNLYMSMSSWCYTHSLDGAGLFLFDHAAEEYEHAKKLIIFLNENNVPVQLTSISAPEHKFEGLTQIFQKAYEHEQHISESINNIVDHAIKSKDHATFNFLQWYVAEQHEEEVLFKDILDKIELIGNENHGLYLADQYVKGIAKSRKSGS

SEQ ID NO: 52 - protein, 396 aa, Artificial Sequence
  Description of Artificial Sequence: Synthetic polypeptide
HHHHHHHHGPLEVLFQGPNITNLCPFGEVFNATRFASVYAWNRKRISNCVADYSVLYNSASFSTFKCYGVSPTKLNDLCFTNVYADSFVIRGDEVRQIAPGQTGKIADYNYKLPDDFTGCVIAWNSNNLDSKVGGNYNYLYRLFRKSNLKPFERDRSTEIYQAGSTPCNGVEGFNCYFPLQSYGFQPTNGVGYQPYRVVVLSFELLHAPATVCGPGSGGGGESQVRQQFSKDIEKLLNEQVNKEMQSSNLYMSMSSWCYTHSLDGAGLFLFDHAAEEYEHAKKLIIFLNENNVPVQLTSISAPEHKFEGLTQIFQKAYEHEQHISESINNIVDHAIKSKDHATFNFLQWYVAEQHEEEVLFKDILDKIELIGNENHGLYLADQYVKGIAKSRKSGS

SEQ ID NO: 53 - protein, 396 aa, Artificial Sequence
  Description of Artificial Sequence: Synthetic polypeptide
HHHHHHHHGPLEVLFQGPNITNLCPFGEVFNATRFASVYAWNRKRISNCVADYSVLYNSASFSTFKCYGVSPTKLNDLCFTNVYADSFVIRGDEVRQIAPGQTGKIADYNYKLPDDFTGCVIAWNSNNLDSKVGGNYNYLRRLFRKSNLKPFERDISTEIYQAGSTPCNGVEGFNCYFPLQSYGFQPTNGVGYQPYRVVVLSFELLHAPATVCGPGSGGGGESQVRQQFSKDIEKLLNEQVNKEMQSSNLYMSMSSWCYTHSLDGAGLFLFDHAAEEYEHAKKLIIFLNENNVPVQLTSISAPEHKFEGLTQIFQKAYEHEQHISESINNIVDHAIKSKDHATFNFLQWYVAEQHEEEVLFKDILDKIELIGNENHGLYLADQYVKGIAKSRKSGS

SEQ ID NO: 54 - protein, 396 aa, Artificial Sequence
  Description of Artificial Sequence: Synthetic polypeptide
HHHHHHHHGPLEVLFQGPNITNLCPFGEVFNATRFASVYAWNRKRISNCVADYSVLYNSASFSTFKCYGVSPTKLNDLCFTNVYADSFVIRGDEVRQIAPGQTGKIADYNYKLPDDFTGCVIAWNSNNLDSKVGGNYNYRYRLFRKSNLKPFERDISTEIYQAGSTPCNGVEGFNCYFPLQSYGFQPTNGVGYQPYRVVVLSFELLHAPATVCGPGSGGGGESQVRQQFSKDIEKLLNEQVNKEMQSSNLYMSMSSWCYTHSLDGAGLFLFDHAAEEYEHAKKLIIFLNENNVPVQLTSISAPEHKFEGLTQIFQKAYEHEQHISESINNIVDHAIKSKDHATFNFLQWYVAEQHEEEVLFKDILDKIELIGNENHGLYLADQYVKGIAKSRKSGS

SEQ ID NO: 55 - protein, 396 aa, Artificial Sequence
  Description of Artificial Sequence: Synthetic polypeptide
HHHHHHHHGPLEVLFQGPNITNLCPFGEVFNATRFASVYAWNRKRISNCVADYSVLYNSASFSTFKCYGVSPTKLNDLCFTNVYADSFVIRGDEVRQIAPGQTGKIADYNYKLPDDFTGCVIAWNSNNLDSKVGGNYNYLYRLFRKSNLKPFERDISTEIYQAGSTPCNGVEGFNCYFPRQSYGFQPTNGVGYQPYRVVVLSFELLHAPATVCGPGSGGGGESQVRQQFSKDIEKLLNEQVNKEMQSSNLYMSMSSWCYTHSLDGAGLFLFDHAAEEYEHAKKLIIFLNENNVPVQLTSISAPEHKFEGLTQIFQKAYEHEQHISESINNIVDHAIKSKDHATFNFLQWYVAEQHEEEVLFKDILDKIELIGNENHGLYLADQYVKGIAKSRKSGS

SEQ ID NO: 56 - protein, 396 aa, Artificial Sequence
  Description of Artificial Sequence: Synthetic polypeptide
HHHHHHHHGPLEVLFQGPNITNLCPFGEVFNATRFASVYAWNRKRISNCVADYSVLYNSASFSTFKCYGVSPTKLNDLCFTNVYADSFVIRGDEVRQIAPGQTGKIADYNYKLPDDFTGCVIAWNSNNLDSKVGGNYNYLYRLFRKSNLKPFERDISTEIYQAGSTPCNGVEGFNCYRPLQSYGFQPTNGVGYQPYRVVVLSFELLHAPATVCGPGSGGGGESQVRQQFSKDIEKLLNEQVNKEMQSSNLYMSMSSWCYTHSLDGAGLFLFDHAAEEYEHAKKLIIFLNENNVPVQLTSISAPEHKFEGLTQIFQKAYEHEQHISESINNIVDHAIKSKDHATFNFLQWYVAEQHEEEVLFKDILDKIELIGNENHGLYLADQYVKGIAKSRKSGS

SEQ ID NO: 57 - protein, 396 aa, Artificial Sequence
  Description of Artificial Sequence: Synthetic polypeptide
HHHHHHHHGPLEVLFQGPNITNLCPFGEVFNATRFASVYAWNRKRISNCVADYSVLYNSASFSTFKCYGVSPTKLNDLCFTNVYADSFVIRGDEVRQIAPGQTGKIADYNYKLPDDFTGCVIAWNSNNLDSKVGGNYNYLYRLFRKSNLKPFERDISTEIYQAGSTPCNGVEGFNCYAPLQSYGFQPTNGVGYQPYRVVVLSFELLHAPATVCGPGSGGGGESQVRQQFSKDIEKLLNEQVNKEMQSSNLYMSMSSWCYTHSLDGAGLFLFDHAAEEYEHAKKLIIFLNENNVPVQLTSISAPEHKFEGLTQIFQKAYEHEQHISESINNIVDHAIKSKDHATFNFLQWYVAEQHEEEVLFKDILDKIELIGNENHGLYLADQYVKGIAKSRKSGS

SEQ ID NO: 58 - protein, 396 aa, Artificial Sequence
  Description of Artificial Sequence: Synthetic polypeptide
HHHHHHHHGPLEVLFQGPNITNLCPFGEVFNATRFASVYAWNRKRISNCVADYSVLYNSASFSTFKCYGVSPTKLNDLCFTNVYADSFVIRGDEVRQIAPGQTGKIADYNYKLPDDFTGCVIAWNSNNLDSKVGGNYNYLYRLFRKSNLKPFERDISTEIYQAGSTPCNGVEGFNCYFPLQSYGFQPTNGVGYQPYRVVVLSFENKSAPATVCGPGSGGGGESQVRQQFSKDIEKLLNEQVNKEMQSSNLYMSMSSWCYTHSLDGAGLFLFDHAAEEYEHAKKLIIFLNENNVPVQLTSISAPEHKFEGLTQIFQKAYEHEQHISESINNIVDHAIKSKDHATFNFLQWYVAEQHEEEVLFKDILDKIELIGNENHGLYLADQYVKGIAKSRKSGS

SEQ ID NO: 59 - protein, 396 aa, Artificial Sequence
  Description of Artificial Sequence: Synthetic polypeptide
HHHHHHHHGPLEVLFQGPNITNLCPFGEVFNATRFASVYAWNRKRISNCVADYSVLYNSASFSTFKCYGVSPTKLNDLCFTNVYADSFVIRGDEVRQIAPGQTGKIADYNYKLPDDFTGCVIAWNSNNLDSKVGGNYNYLYRLFRKSNLKPFERDISTEIYQAGSTPCNGVEGFNCYFPLQSYGFQPTNGVGYQPYRVVVLSFELRHAPATVCGPGSGGGGESQVRQQFSKDIEKLLNEQVNKEMQSSNLYMSMSSWCYTHSLDGAGLFLFDHAAEEYEHAKKLIIFLNENNVPVQLTSISAPEHKFEGLTQIFQKAYEHEQHISESINNIVDHAIKSKDHATFNFLQWYVAEQHEEEVLFKDILDKIELIGNENHGLYLADQYVKGIAKSRKSGS

SEQ ID NO: 60 - protein, 396 aa, Artificial Sequence
  Description of Artificial Sequence: Synthetic polypeptide
HHHHHHHHGPLEVLFQGPNITNNCPFGEVFNATRFASVYAWNRKRISNCVADYSTLYNSASFSTFKCYGVSPTKLNDLCFTNVYADSFVIRGDEVRQIAPGQTGKIADYNYKLPDDFTGCVIAWNSNNLDSKVGGNYNYLYRLFRKSNLKPFERDISTEIYQAGSTPCNGVEGFNCYFPLQSYGFQPTNGVGYQPYRVVVLSFELLHAPATVCGPGSGGGGESQVRQQFSKDIEKLLNEQVNKEMQSSNLYMSMSSWCYTHSLDGAGLFLFDHAAEEYEHAKKLIIFLNENNVPVQLTSISAPEHKFEGLTQIFQKAYEHEQHISESINNIVDHAIKSKDHATFNFLQWYVAEQHEEEVLFKDILDKIELIGNENHGLYLADQYVKGIAKSRKSGS

SEQ ID NO: 61 - protein, 396 aa, Artificial Sequence
  Description of Artificial Sequence: Synthetic polypeptide
HHHHHHHHGPLEVLFQGPNITNLCPFGEVFNATRFASVYAWNRKRISNCVADYSVLYNSASFSTFKCYGVSPNKTNDLCFTNVYADSFVIRGDEVRQIAPGQTGKIADYNYKLPDDFTGCVIAWNSNNLDSKVGGNYNYLYRLFRKSNLKPFERDISTEIYQAGSTPCNGVEGFNCYFPLQSYGFQPTNGVGYQPYRVVVLSFELLHAPATVCGPGSGGGGESQVRQQFSKDIEKLLNEQVNKEMQSSNLYMSMSSWCYTHSLDGAGLFLFDHAAEEYEHAKKLIIFLNENNVPVQLTSISAPEHKFEGLTQIFQKAYEHEQHISESINNIVDHAIKSKDHATFNFLQWYVAEQHEEEVLFKDILDKIELIGNENHGLYLADQYVKGIAKSRKSGS

SEQ ID NO: 62 - protein, 396 aa, Artificial Sequence
  Description of Artificial Sequence: Synthetic polypeptide
HHHHHHHHGPLEVLFQGPNITNLCPFGEVFNATRFASVYAWNRKRISNCVADYSVLYNSASFSTFKCYGRSPTKLNDLCFTNVYADSFVIRGDEVRQIAPGQTGKIADYNYKLPDDFTGCVIAWNSNNLDSKVGGNYNYLYRLFRKSNLKPFERDISTEIYQAGSTPCNGVEGFNCYFPLQSYGFQPTNGVGYQPYRVVVLSFELLHAPATVCGPGSGGGGESQVRQQFSKDIEKLLNEQVNKEMQSSNLYMSMSSWCYTHSLDGAGLFLFDHAAEEYEHAKKLIIFLNENNVPVQLTSISAPEHKFEGLTQIFQKAYEHEQHISESINNIVDHAIKSKDHATFNFLQWYVAEQHEEEVLFKDILDKIELIGNENHGLYLADQYVKGIAKSRKSGS

SEQ ID NO: 63 - protein, 396 aa, Artificial Sequence
  Description of Artificial Sequence: Synthetic polypeptide
HHHHHHHHGPLEVLFQGPNITNLCPFGEVFNATRFASVYAWNRKRISNCVADYSVLYNSASFSTRKCYGVSPTKLNDLCFTNVYADSFVIRGDEVRQIAPGQTGKIADYNYKLPDDFTGCVIAWNSNNLDSKVGGNYNYLYRLFRKSNLKPFERDISTEIYQAGSTPCNGVEGFNCYFPLQSYGFQPTNGVGYQPYRVVVLSFELLHAPATVCGPGSGGGGESQVRQQFSKDIEKLLNEQVNKEMQSSNLYMSMSSWCYTHSLDGAGLFLFDHAAEEYEHAKKLIIFLNENNVPVQLTSISAPEHKFEGLTQIFQKAYEHEQHISESINNIVDHAIKSKDHATFNFLQWYVAEQHEEEVLFKDILDKIELIGNENHGLYLADQYVKGIAKSRKSGS

SEQ ID NO: 64 - protein, 469 aa, Artificial Sequence
  Description of Artificial Sequence: Synthetic polypeptide
VNLTTRTQLPPAYTNSFTRGVYYPDKVFRSSVLHSTQDLFLPFFSNVTWFHAIHVSGTNGTKRFDNPVLPFNDGVYFASTEKSNIIRGWIFGTTLDSKTQSLLIVNNATNVVIKVCEFQFCNDPFLGVYYHKNNKSWMESEFRVYSSANNCTFEYVSQPFLMDLEGKQGNFKNLREFVFKNIDGYFKIYSKHTPINLVRDLPQGFSALEPLVDLPIGINITRFQTLLALHRSYLTPGDSSSGWTAGAAAYYVGYLQPRTFLLKYNENGTITDAVDCALDPLSETKCTLGSGGGGESQVRQQFSKDIEKLLNEQVNKEMQSSNLYMSMSSWCYTHSLDGAGLFLFDHAAEEYEHAKKLIIFLNENNVPVQLTSISAPEHKFEGLTQIFQKAYEHEQHISESINNIVDHAIKSKDHATFNFLQWYVAEQHEEEVLFKDILDKIELIGNENHGLYLADQYVKGIAKSRKSGS

SEQ ID NO: 65 - protein, 491 aa, Artificial Sequence
  Description of Artificial Sequence: Synthetic polypeptide
HHHHHHHHGPLEVLFQGPSSQCVNLTTRTQLPPAYTNSFTRGVYYPDKVFRSSVLHSTQDLFLPFFSNVTWFHAIHVSGTNGTKRFDNPVLPFNDGVYFASTEKSNIIRGWIFGTTLDSKTQSLLIVNNATNVVIKVCEFQFCNDPFLGVYYHKNNKSWMESEFRVYSSANNCTFEYVSQPFLMDLEGKQGNFKNLREFVFKNIDGYFKIYSKHTPINLVRDLPQGFSALEPLVDLPIGINITRFQTLLALHRSYLTPGDSSSGWTAGAAAYYVGYLQPRTFLLKYNENGTITDAVDCALDPLSETKCTLGSGGGGESQVRQQFSKDIEKLLNEQVNKEMQSSNLYMSMSSWCYTHSLDGAGLFLFDHAAEEYEHAKKLIIFLNENNVPVQLTSISAPEHKFEGLTQIFQKAYEHEQHISESINNIVDHAIKSKDHATFNFLQWYVAEQHEEEVLFKDILDKIELIGNENHGLYLADQYVKGIAKSRKSGS

SEQ ID NO: 66 - protein, 473 aa, Artificial Sequence
  Description of Artificial Sequence: Synthetic polypeptide
SSQCVNLTTRTQLPPAYTNSFTRGVYYPDKVFRSSVLHSTQDLFLPFFSNVTWFHAIHVSGTNGTKRFDNPVLPFNDGVYFASTEKSNIIRGWIFGTTLDSKTQSLLIVNNATNVVIKVCEFQFCNDPFLGVYYHKNNKSWMESEFRVYSSANNCTFEYVSQPFLMDLEGKQGNFKNLREFVFKNIDGYFKIYSKHTPINLVRDLPQGFSALEPLVDLPIGINITRFQTLLALHRSYLTPGDSSSGWTAGAAAYYVGYLQPRTFLLKYNENGTITDAVDCALDPLSETKCTLGSGGGGESQVRQQFSKDIEKLLNEQVNKEMQSSNLYMSMSSWCYTHSLDGAGLFLFDHAAEEYEHAKKLIIFLNENNVPVQLTSISAPEHKFEGLTQIFQKAYEHEQHISESINNIVDHAIKSKDHATFNFLQWYVAEQHEEEVLFKDILDKIELIGNENHGLYLADQYVKGIAKSRKSGS

SEQ ID NO: 67 - protein, 866 aa, Artificial Sequence
  Description of Artificial Sequence: Synthetic polypeptide
HHHHHHHHGPLEVLFQGPSSQCVNLTTRTQLPPAYTNSFTRGVYYPDKVFRSSVLHSTQDLFLPFFSNVTWFHAIHVSGTNGTKRFDNPVLPFNDGVYFASTEKSNIIRGWIFGTTLDSKTQSLLIVNNATNVVIKVCEFQFCNDPFLGVYYHKNNKSWMESEFRVYSSANNCTFEYVSQPFLMDLEGKQGNFKNLREFVFKNIDGYFKIYSKHTPINLVRDLPQGFSALEPLVDLPIGINITRFQTLLALHRSYLTPGDSSSGWTAGAAAYYVGYLQPRTFLLKYNENGTITDAVDCALDPLSETKCTLKSFTVEKGIYQTSNFRVQPTESIVRFPNITNLCPFGEVFNATRFASVYAWNRKRISNCVADYSVLYNSASFSTFKCYGVSPTKLNDLCFTNVYADSFVIRGDEVRQIAPGQTGKIADYNYKLPDDFTGCVIAWNSNNLDSKVGGNYNYLYRLFRKSNLKPFERDISTEIYQAGSTPCNGVEGFNCYFPLQSYGFQPTNGVGYQPYRVVVLSFELLHAPATVCGPKKSTNLVKNKCVNFNFNGLTGTGVLTESNKKFLPFQQFGRDIADTTDAVRDPQTLEILDITPCSFGGVSVITPGTNTSNQVAVLYQDVNCTEVPVAIHADQLTPTWRVYSTGSNVFQTRAGCLIGAEHVNNSYECDIPIGAGICASYQTQTGSGGGGESQVRQQFSKDIEKLLNEQVNKEMQSSNLYMSMSSWCYTHSLDGAGLFLFDHAAEEYEHAKKLIIFLNENNVPVQLTSISAPEHKFEGLTQIFQKAYEHEQHISESINNIVDHAIKSKDHATFNFLQWYVAEQHEEEVLFKDILDKIELIGNENHGLYLADQYVKGIAKSRKSGS

SEQ ID NO: 68 - protein, 848 aa, Artificial Sequence
  Description of Artificial Sequence: Synthetic polypeptide
SSQCVNLTTRTQLPPAYTNSFTRGVYYPDKVFRSSVLHSTQDLFLPFFSNVTWFHAIHVSGTNGTKRFDNPVLPFNDGVYFASTEKSNIIRGWIFGTTLDSKTQSLLIVNNATNVVIKVCEFQFCNDPFLGVYYHKNNKSWMESEFRVYSSANNCTFEYVSQPFLMDLEGKQGNFKNLREFVFKNIDGYFKIYSKHTPINLVRDLPQGFSALEPLVDLPIGINITRFQTLLALHRSYLTPGDSSSGWTAGAAAYYVGYLQPRTFLLKYNENGTITDAVDCALDPLSETKCTLKSFTVEKGIYQTSNFRVQPTESIVRFPNITNLCPFGEVFNATRFASVYAWNRKRISNCVADYSVLYNSASFSTFKCYGVSPTKLNDLCFTNVYADSFVIRGDEVRQIAPGQTGKIADYNYKLPDDFTGCVIAWNSNNLDSKVGGNYNYLYRLFRKSNLKPFERDISTEIYQAGSTPCNGVEGFNCYFPLQSYGFQPTNGVGYQPYRVVVLSFELLHAPATVCGPKKSTNLVKNKCVNFNFNGLTGTGVLTESNKKFLPFQQFGRDIADTTDAVRDPQTLEILDITPCSFGGVSVITPGTNTSNQVAVLYQDVNCTEVPVAIHADQLTPTWRVYSTGSNVFQTRAGCLIGAEHVNNSYECDIPIGAGICASYQTQTGSGGGGESQVRQQFSKDIEKLLNEQVNKEMQSSNLYMSMSSWCYTHSLDGAGLFLFDHAAEEYEHAKKLIIFLNENNVPVQLTSISAPEHKFEGLTQIFQKAYEHEQHISESINNIVDHAIKSKDHATFNFLQWYVAEQHEEEVLFKDILDKIELIGNENHGLYLADQYVKGIAKSRKSGS

SEQ ID NO: 69 - protein, 1275 aa, Artificial Sequence
  Description of Artificial Sequence: Synthetic polypeptide
SSQCVNLTTRTQLPPAYTNSFTRGVYYPDKVFRSSVLHSTQDLFLPFFSNVTWFHAIHVSGTNGTKRFDNPVLPFNDGVYFASTEKSNIIRGWIFGTTLDSKTQSLLIVNNATNVVIKVCEFQFCNDPFLGVYYHKNNKSWMESEFRVYSSANNCTFEYVSQPFLMDLEGKQGNFKNLREFVFKNIDGYFKIYSKHTPINLVRDLPQGFSALEPLVDLPIGINITRFQTLLALHRSYLTPGDSSSGWTAGAAAYYVGYLQPRTFLLKYNENGTITDAVDCALDPLSETKCTLKSFTVEKGIYQTSNFRVQPTESIVRFPNITNLCPFGEVFNATRFASVYAWNRKRISNCVADYSVLYNSASFSTFKCYGVSPTKLNDLCFTNVYADSFVIRGDEVRQIAPGQTGKIADYNYKLPDDFTGCVIAWNSNNLDSKVGGNYNYLYRLFRKSNLKPFERDISTEIYQAGSTPCNGVEGFNCYFPLQSYGFQPTNGVGYQPYRVVVLSFELLHAPATVCGPKKSTNLVKNKCVNFNFNGLTGTGVLTESNKKFLPFQQFGRDIADTTDAVRDPQTLEILDITPCSFGGVSVITPGTNTSNQVAVLYQDVNCTEVPVAIHADQLTPTWRVYSTGSNVFQTRAGCLIGAEHVNNSYECDIPIGAGICASYQTQTNSPGSASSVASQSIIAYTMSLGAENSVAYSNNSIAIPTNFTISVTTEILPVSMTKTSVDCTMYICGDSTECSNLLLQYGSFCTQLNRALTGIAVEQDKNTQEVFAQVKQIYKTPPIKDFGGFNFSQILPDPSKPSKRSFIEDLLFNKVTLADAGFIKQYGDCLGDIAARDLICAQKFNGLTVLPPLLTDEMIAQYTSALLAGTITSGWTFGAGAALQIPFAMQMAYRFNGIGVTQNVLYENQKLIANQFNSAIGKIQDSLSSTASALGKLQDVVNQNAQALNTLVKQLSSNFGAISSVLNDILSRLDPPEAEVQIDRLITGRLQSLQTYVTQQLIRAAEIRASANLAATKMSECVLGQSKRVDFCGKGYHLMSFPQSAPHGVVFLHVTYVPAQEKNFTTAPAICHDGKAHFPREGVFVSNGTHWFVTQRNFYEPQIITTDNTFVSGNCDVVIGIVNNTVYDPLQPELDSFKEELDKYFKNHTSPDVDLGDISGINASVVNIQKEIDRLNEVAKNLNESLIDLQELGKYEQGSGYIPEAPRDGQAYVRKDGEWVLLSTFLGLEVLFQGPSAWSHPQFEKGGGSGGGSGGSAWSHPQFEKGSHHHHHHHH

SEQ ID NO: 70 - protein, 1291 aa, Artificial Sequence
  Description of Artificial Sequence: Synthetic polypeptide
VNLTTRTQLPPAYTNSFTRGVYYPDKVFRSSVLHSTQDLFLPFFSNVTWFHAIHVSGTNGTKRFDNPVLPFNDGVYFASTEKSNIIRGWIFGTTLDSKTQSLLIVNNATNVVIKVCEFQFCNDPFLGVYYHKNNKSWMESEFRVYSSANNCTFEYVSQPFLMDLEGKQGNFKNLREFVFKNIDGYFKIYSKHTPINLVRDLPQGFSALEPLVDLPIGINITRFQTLLALHRSYLTPGDSSSGWTAGAAAYYVGYLQPRTFLLKYNENGTITDAVDCALDPLSETKCTLKSFTVEKGIYQTSNFRVQPTESIVRFPNITNLCPFGEVFNATRFASVYAWNRKRISNCVADYSVLYNSASFSTFKCYGVSPTKLNDLCFTNVYADSFVIRGDEVRQIAPGQTGKIADYNYKLPDDFTGCVIAWNSNNLDSKVGGNYNYLYRLFRKSNLKPFERDISTEIYQAGSTPCNGVEGFNCYFPLQSYGFQPTNGVGYQPYRVVVLSFELLHAPATVCGPKKSTNLVKNKCVNFNFNGLTGTGVLTESNKKFLPFQQFGRDIADTTDAVRDPQTLEILDITPCSFGGVSVITPGTNTSNQVAVLYQDVNCTEVPVAIHADQLTPTWRVYSTGSNVFQTRAGCLIGAEHVNNSYECDIPIGAGICASYQTQTNSPGSASSVASQSIIAYTMSLGAENSVAYSNNSIAIPTNFTISVTTEILPVSMTKTSVDCTMYICGDSTECSNLLLQYGSFCTQLNRALTGIAVEQDKNTQEVFAQVKQIYKTPPIKDFGGFNFSQILPDPSKPSKRSFIEDLLFNKVTLADAGFIKQYGDCLGDIAARDLICAQKFNGLTVLPPLLTDEMIAQYTSALLAGTITSGWTFGAGAALQIPFAMQMAYRFNGIGVTQNVLYENQKLIANQFNSAIGKIQDSLSSTASALGKLQDVVNQNAQALNTLVKQLSSNFGAISSVLNDILSRLDPPEAEVQIDRLITGRLQSLQTYVTQQLIRAAEIRASANLAATKMSECVLGQSKRVDFCGKGYHLMSFPQSAPHGVVFLHVTYVPAQEKNFTTAPAICHDGKAHFPREGVFVSNGTHWFVTQRNFYEPQIITTDNTFVSGNCDVVIGIVNNTVGSGGDIIKLLNEQVNKEMQSSNLYMSMSSWCYTHSLDGAGLFLFDHAAEEYEHAKKLIIFLNENNVPVQLTSISAPEHKFEGLTQIFQKAYEHEQHISESINNIVDHAIKSKDHATFNFLQWYVAEQHEEEVLFKDILDKIELIGNENHGLYLADQYVKGIAKSRKSGS

SEQ ID NO: 71 - protein, 1293 aa, Artificial Sequence
  Description of Artificial Sequence: Synthetic polypeptide
VNLTTRTQLPPAYTNSFTRGVYYPDKVFRSSVLHSTQDLFLPFFSNVTWFHAIHVSGTNGTKRFDNPVLPFNDGVYFASTEKSNIIRGWIFGTTLDSKTQSLLIVNNATNVVIKVCEFQFCNDPFLGVYYHKNNKSWMESEFRVYSSANNCTFEYVSQPFLMDLEGKQGNFKNLREFVFKNIDGYFKIYSKHTPINLVRDLPQGFSALEPLVDLPIGINITRFQTLLALHRSYLTPGDSSSGWTAGAAAYYVGYLQPRTFLLKYNENGTITDAVDCALDPLSETKCTLKSFTVEKGIYQTSNFRVQPTESIVRFPNITNLCPFGEVFNATRFASVYAWNRKRISNCVADYSVLYNSASFSTFKCYGVSPTKLNDLCFTNVYADSFVIRGDEVRQIAPGQTGKIADYNYKLPDDFTGCVIAWNSNNLDSKVGGNYNYLYRLFRKSNLKPFERDISTEIYQAGSTPCNGVEGFNCYFPLQSYGFQPTNGVGYQPYRVVVLSFELLHAPATVCGPKKSTNLVKNKCVNFNFNGLTGTGVLTESNKKFLPFQQFGRDIADTTDAVRDPQTLEILDITPCSFGGVSVITPGTNTSNQVAVLYQDVNCTEVPVAIHADQLTPTWRVYSTGSNVFQTRAGCLIGAEHVNNSYECDIPIGAGICASYQTQTNSPGSASSVASQSIIAYTMSLGAENSVAYSNNSIAIPTNFTISVTTEILPVSMTKTSVDCTMYICGDSTECSNLLLQYGSFCTQLNRALTGIAVEQDKNTQEVFAQVKQIYKTPPIKDFGGFNFSQILPDPSKPSKRSFIEDLLFNKVTLADAGFIKQYGDCLGDIAARDLICAQKFNGLTVLPPLLTDEMIAQYTSALLAGTITSGWTFGAGAALQIPFAMQMAYRFNGIGVTQNVLYENQKLIANQFNSAIGKIQDSLSSTASALGKLQDVVNQNAQALNTLVKQLSSNFGAISSVLNDILSRLDPPEAEVQIDRLITGRLQSLQTYVTQQLIRAAEIRASANLAATKMSECVLGQSKRVDFCGKGYHLMSFPQSAPHGVVFLHVTYVPAQEKNFTTAPAICHDGKAHFPREGVFVSNGTHWFVTQRNFYEPQIITTDNTFVSGNCDVVIGIVNNTVGSGGSGDIIKLLNEQVNKEMQSSNLYMSMSSWCYTHSLDGAGLFLFDHAAEEYEHAKKLIIFLNENNVPVQLTSISAPEHKFEGLTQIFQKAYEHEQHISESINNIVDHAIKSKDHATFNFLQWYVAEQHEEEVLFKDILDKIELIGNENHGLYLADQYVKGIAKSRKSGS

SEQ ID NO: 72 - protein, 1364 aa, Artificial Sequence
  Description of Artificial Sequence: Synthetic polypeptide
VNLTTRTQLPPAYTNSFTRGVYYPDKVFRSSVLHSTQDLFLPFFSNVTWFHAIHVSGTNGTKRFDNPVLPFNDGVYFASTEKSNIIRGWIFGTTLDSKTQSLLIVNNATNVVIKVCEFQFCNDPFLGVYYHKNNKSWMESEFRVYSSANNCTFEYVSQPFLMDLEGKQGNFKNLREFVFKNIDGYFKIYSKHTPINLVRDLPQGFSALEPLVDLPIGINITRFQTLLALHRSYLTPGDSSSGWTAGAAAYYVGYLQPRTFLLKYNENGTITDAVDCALDPLSETKCTLKSFTVEKGIYQTSNFRVQPTESIVRFPNITNLCPFGEVFNATRFASVYAWNRKRISNCVADYSVLYNSASFSTFKCYGVSPTKLNDLCFTNVYADSFVIRGDEVRQIAPGQTGKIADYNYKLPDDFTGCVIAWNSNNLDSKVGGNYNYLYRLFRKSNLKPFERDISTEIYQAGSTPCNGVEGFNCYFPLQSYGFQPTNGVGYQPYRVVVLSFELLHAPATVCGPKKSTNLVKNKCVNFNFNGLTGTGVLTESNKKFLPFQQFGRDIADTTDAVRDPQTLEILDITPCSFGGVSVITPGTNTSNQVAVLYQDVNCTEVPVAIHADQLTPTWRVYSTGSNVFQTRAGCLIGAEHVNNSYECDIPIGAGICASYQTQTNSPGSASSVASQSIIAYTMSLGAENSVAYSNNSIAIPTNFTISVTTEILPVSMTKTSVDCTMYICGDSTECSNLLLQYGSFCTQLNRALTGIAVEQDKNTQEVFAQVKQIYKTPPIKDFGGFNFSQILPDPSKPSKRSFIEDLLFNKVTLADAGFIKQYGDCLGDIAARDLICAQKFNGLTVLPPLLTDEMIAQYTSALLAGTITSGWTFGAGAALQIPFAMQMAYRFNGIGVTQNVLYENQKLIANQFNSAIGKIQDSLSSTASALGKLQDVVNQNAQALNTLVKQLSSNFGAISSVLNDILSRLDPPEAEVQIDRLITGRLQSLQTYVTQQLIRAAEIRASANLAATKMSECVLGQSKRVDFCGKGYHLMSFPQSAPHGVVFLHVTYVPAQEKNFTTAPAICHDGKAHFPREGVFVSNGTHWFVTQRNFYEPQIITTDNTFVSGNCDVVIGIVNNTVYDPLQPELDSFKEELDKYFKNHTSPDVDLGDISGINASVVNIQKEIDRLNEVAKNLNESLIDLQELGKYEQGSGGSGDIIKLLNEQVNKEMQSSNLYMSMSSWCYTHSLDGAGLFLFDHAAEEYEHAKKLIIFLNENNVPVQLTSISAPEHKFEGLTQIFQKAYEHEQHISESINNIVDHAIKSKDHATFNFLQWYVAEQHEEEVLFKDILDKIELIGNENHGLYLADQYVKGIAKSRKSGS

SEQ ID NO: 73 - protein, 1400 aa, Artificial Sequence
  Description of Artificial Sequence: Synthetic polypeptide
VNLTTRTQLPPAYTNSFTRGVYYPDKVFRSSVLHSTQDLFLPFFSNVTWFHAIHVSGTNGTKRFDNPVLPFNDGVYFASTEKSNIIRGWIFGTTLDSKTQSLLIVNNATNVVIKVCEFQFCNDPFLGVYYHKNNKSWMESEFRVYSSANNCTFEYVSQPFLMDLEGKQGNFKNLREFVFKNIDGYFKIYSKHTPINLVRDLPQGFSALEPLVDLPIGINITRFQTLLALHRSYLTPGDSSSGWTAGAAAYYVGYLQPRTFLLKYNENGTITDAVDCALDPLSETKCTLKSFTVEKGIYQTSNFRVQPTESIVRFPNITNLCPFGEVFNATRFASVYAWNRKRISNCVADYSVLYNSASFSTFKCYGVSPTKLNDLCFTNVYADSFVIRGDEVRQIAPGQTGKIADYNYKLPDDFTGCVIAWNSNNLDSKVGGNYNYLYRLFRKSNLKPFERDISTEIYQAGSTPCNGVEGFNCYFPLQSYGFQPTNGVGYQPYRVVVLSFELLHAPATVCGPKKSTNLVKNKCVNFNFNGLTGTGVLTESNKKFLPFQQFGRDIADTTDAVRDPQTLEILDITPCSFGGVSVITPGTNTSNQVAVLYQDVNCTEVPVAIHADQLTPTWRVYSTGSNVFQTRAGCLIGAEHVNNSYECDIPIGAGICASYQTQTNSPGSASSVASQSIIAYTMSLGAENSVAYSNNSIAIPTNFTISVTTEILPVSMTKTSVDCTMYICGDSTECSNLLLQYGSFCTQLNRALTGIAVEQDKNTQEVFAQVKQIYKTPPIKDFGGFNFSQILPDPSKPSKRSFIEDLLFNKVTLADAGFIKQYGDCLGDIAARDLICAQKFNGLTVLPPLLTDEMIAQYTSALLAGTITSGWTFGAGAALQIPFAMQMAYRFNGIGVTQNVLYENQKLIANQFNSAIGKIQDSLSSTASALGKLQDVVNQNAQALNTLVKQLSSNFGAISSVLNDILSRLDPPEAEVQIDRLITGRLQSLQTYVTQQLIRAAEIRASANLAATKMSECVLGQSKRVDFCGKGYHLMSFPQSAPHGVVFLHVTYVPAQEKNFTTAPAICHDGKAHFPREGVFVSNGTHWFVTQRNFYEPQIITTDNTFVSGNCDVVIGIVNNTVYDPLQPELDSFKEELDKYFKNHTSPDVDLGDISGINASVVNIQKEIDRLNEVAKNLNESLIDLQELGKYEQGSGGEMKQIEDKIEEILSKIYHIENEIARIKKLIGRGSGGSGDIIKLLNEQVNKEMQSSNLYMSMSSWCYTHSLDGAGLFLFDHAAEEYEHAKKLIIFLNENNVPVQLTSISAPEHKFEGLTQIFQKAYEHEQHISESINNIVDHAIKSKDHATFNFLQWYVAEQHEEEVLFKDILDKIELIGNENHGLYLADQYVKGIAKSRKSGS

SEQ ID NO: 74 - protein, 1310 aa, Artificial Sequence
  Description of Artificial Sequence: Synthetic polypeptide
VNLTTRTQLPPAYTNSFTRGVYYPDKVFRSSVLHSTQDLFLPFFSNVTWFHAIHVSGTNGTKRFDNPVLPFNDGVYFASTEKSNIIRGWIFGTTLDSKTQSLLIVNNATNVVIKVCEFQFCNDPFLGVYYHKNNKSWMESEFRVYSSANNCTFEYVSQPFLMDLEGKQGNFKNLREFVFKNIDGYFKIYSKHTPINLVRDLPQGFSALEPLVDLPIGINITRFQTLLALHRSYLTPGDSSSGWTAGAAAYYVGYLQPRTFLLKYNENGTITDAVDCALDPLSETKCTLKSFTVEKGIYQTSNFRVQPTESIVRFPNITNLCPFGEVFNATRFASVYAWNRKRISNCVADYSVLYNSASFSTFKCYGVSPTKLNDLCFTNVYADSFVIRGDEVRQIAPGQTGKIADYNYKLPDDFTGCVIAWNSNNLDSKVGGNYNYLYRLFRKSNLKPFERDISTEIYQAGSTPCNGVEGFNCYFPLQSYGFQPTNGVGYQPYRVVVLSFELLHAPATVCGPKKSTNLVKNKCVNFNFNGLTGTGVLTESNKKFLPFQQFGRDIADTTDAVRDPQTLEILDITPCSFGGVSVITPGTNTSNQVAVLYQDVNCTEVPVAIHADQLTPTWRVYSTGSNVFQTRAGCLIGAEHVNNSYECDIPIGAGICASYQTQTNSPGSASSVASQSIIAYTMSLGAENSVAYSNNSIAIPTNFTISVTTEILPVSMTKTSVDCTMYICGDSTECSNLLLQYGSFCTQLNRALTGIAVEQDKNTQEVFAQVKQIYKTPPIKDFGGFNFSQILPDPSKPSKRSFIEDLLFNKVTLADAGFIKQYGDCLGDIAARDLICAQKFNGLTVLPPLLTDEMIAQYTSALLAGTITSGWTFGAGAALQIPFAMQMAYRFNGIGVTQNVLYENQKLIANQFNSAIGKIQDSLSSTASALGKLQDVVNQNAQALNTLVKQLSSNFGAISSVLNDILSRLDPPEAEVQIDRLITGRLQSLQTYVTQQLIRAAEIRASANLAATKMSECVLGQSKRVDFCGKGYHLMSFPQSAPHGVVFLHVTYVPAQEKNFTTAPAICHDGKAHFPREGVFVSNGTHWFVTQRNFYEPQIITTDNTFVSGNCDVVIGIVNNTVYDPLQPELDSFKEELDKGSGGSGDIIKLLNEQVNKEMQSSNLYMSMSSWCYTHSLDGAGLFLFDHAAEEYEHAKKLIIFLNENNVPVQLTSISAPEHKFEGLTQIFQKAYEHEQHISESINNIVDHAIKSKDHATFNFLQWYVAEQHEEEVLFKDILDKIELIGNENHGLYLADQYVKGIAKSRKSGS

SEQ ID NO: 75 - protein, 1314 aa, Artificial Sequence
  Description of Artificial Sequence: Synthetic polypeptide
VNLTTRTQLPPAYTNSFTRGVYYPDKVFRSSVLHSTQDLFLPFFSNVTWFHAIHVSGTNGTKRFDNPVLPFNDGVYFASTEKSNIIRGWIFGTTLDSKTQSLLIVNNATNVVIKVCEFQFCNDPFLGVYYHKNNKSWMESEFRVYSSANNCTFEYVSQPFLMDLEGKQGNFKNLREFVFKNIDGYFKIYSKHTPINLVRDLPQGFSALEPLVDLPIGINITRFQTLLALHRSYLTPGDSSSGWTAGAAAYYVGYLQPRTFLLKYNENGTITDAVDCALDPLSETKCTLKSFTVEKGIYQTSNFRVQPTESIVRFPNITNLCPFGEVFNATRFASVYAWNRKRISNCVADYSVLYNSASFSTFKCYGVSPTKLNDLCFTNVYADSFVIRGDEVRQIAPGQTGKIADYNYKLPDDFTGCVIAWNSNNLDSKVGGNYNYLYRLFRKSNLKPFERDISTEIYQAGSTPCNGVEGFNCYFPLQSYGFQPTNGVGYQPYRVVVLSFELLHAPATVCGPKKSTNLVKNKCVNFNFNGLTGTGVLTESNKKFLPFQQFGRDIADTTDAVRDPQTLEILDITPCSFGGVSVITPGTNTSNQVAVLYQDVNCTEVPVAIHADQLTPTWRVYSTGSNVFQTRAGCLIGAEHVNNSYECDIPIGAGICASYQTQTNSPGSASSVASQSIIAYTMSLGAENSVAYSNNSIAIPTNFTISVTTEILPVSMTKTSVDCTMYICGDSTECSNLLLQYGSFCTQLNRALTGIAVEQDKNTQEVFAQVKQIYKTPPIKDFGGFNFSQILPDPSKPSKRSFIEDLLFNKVTLADAGFIKQYGDCLGDIAARDLICAQKFNGLTVLPPLLTDEMIAQYTSALLAGTITSGWTFGAGAALQIPFAMQMAYRFNGIGVTQNVLYENQKLIANQFNSAIGKIQDSLSSTASALGKLQDVVNQNAQALNTLVKQLSSNFGAISSVLNDILSRLDPPEAEVQIDRLITGRLQSLQTYVTQQLIRAAEIRASANLAATKMSECVLGQSKRVDFCGKGYHLMSFPQSAPHGVVFLHVTYVPAQEKNFTTAPAICHDGKAHFPREGVFVSNGTHWFVTQRNFYEPQIITTDNTFVSGNCDVVIGIVNNTVYDPLQSELDSIKEELDKIHKNGSGGSGDIIKLLNEQVNKEMQSSNLYMSMSSWCYTHSLDGAGLFLFDHAAEEYEHAKKLIIFLNENNVPVQLTSISAPEHKFEGLTQIFQKAYEHEQHISESINNIVDHAIKSKDHATFNFLQWYVAEQHEEEVLFKDILDKIELIGNENHGLYLADQYVKGIAKSRKSGS

SEQ ID NO: 76 - protein, 1314 aa, Artificial Sequence
  Description of Artificial Sequence: Synthetic polypeptide
VNLTTRTQLPPAYTNSFTRGVYYPDKVFRSSVLHSTQDLFLPFFSNVTWFHAIHVSGTNGTKRFDNPVLPFNDGVYFASTEKSNIIRGWIFGTTLDSKTQSLLIVNNATNVVIKVCEFQFCNDPFLGVYYHKNNKSWMESEFRVYSSANNCTFEYVSQPFLMDLEGKQGNFKNLREFVFKNIDGYFKIYSKHTPINLVRDLPQGFSALEPLVDLPIGINITRFQTLLALHRSYLTPGDSSSGWTAGAAAYYVGYLQPRTFLLKYNENGTITDAVDCALDPLSETKCTLKSFTVEKGIYQTSNFRVQPTESIVRFPNITNLCPFGEVFNATRFASVYAWNRKRISNCVADYSVLYNSASFSTFKCYGVSPTKLNDLCFTNVYADSFVIRGDEVRQIAPGQTGKIADYNYKLPDDFTGCVIAWNSNNLDSKVGGNYNYLYRLFRKSNLKPFERDISTEIYQAGSTPCNGVEGFNCYFPLQSYGFQPTNGVGYQPYRVVVLSFELLHAPATVCGPKKSTNLVKNKCVNFNFNGLTGTGVLTESNKKFLPFQQFGRDIADTTDAVRDPQTLEILDITPCSFGGVSVITPGTNTSNQVAVLYQDVNCTEVPVAIHADQLTPTWRVYSTGSNVFQTRAGCLIGAEHVNNSYECDIPIGAGICASYQTQTNSPGSASSVASQSIIAYTMSLGAENSVAYSNNSIAIPTNFTISVTTEILPVSMTKTSVDCTMYICGDSTECSNLLLQYGSFCTQLNRALTGIAVEQDKNTQEVFAQVKQIYKTPPIKDFGGFNFSQILPDPSKPSKRSFIEDLLFNKVTLADAGFIKQYGDCLGDIAARDLICAQKFNGLTVLPPLLTDEMIAQYTSALLAGTITSGWTFGAGAALQIPFAMQMAYRFNGIGVTQNVLYENQKLIANQFNSAIGKIQDSLSSTASALGKLQDVVNQNAQALNTLVKQLSSNFGAISSVLNDILSRLDPPEAEVQIDRLITGRLQSLQTYVTQQLIRAAEIRASANLAATKMSECVLGQSKRVDFCGKGYHLMSFPQSAPHGVVFLHVTYVPAQEKNFTTAPAICHDGKAHFPREGVFVSNGTHWFVTQRNFYEPQIITTDNTFVSGNCDVVIGIVNNTVYDPLQSEIDSIKEEIDKIHKNGSGGSGDIIKLLNEQVNKEMQSSNLYMSMSSWCYTHSLDGAGLFLFDHAAEEYEHAKKLIIFLNENNVPVQLTSISAPEHKFEGLTQIFQKAYEHEQHISESINNIVDHAIKSKDHATFNFLQWYVAEQHEEEVLFKDILDKIELIGNENHGLYLADQYVKGIAKSRKSGS

SEQ ID NO: 77 - protein, 1328 aa, Artificial Sequence
  Description of Artificial Sequence: Synthetic polypeptide
VNLTTRTQLPPAYTNSFTRGVYYPDKVFRSSVLHSTQDLFLPFFSNVTWFHAIHVSGTNGTKRFDNPVLPFNDGVYFASTEKSNIIRGWIFGTTLDSKTQSLLIVNNATNVVIKVCEFQFCNDPFLGVYYHKNNKSWMESEFRVYSSANNCTFEYVSQPFLMDLEGKQGNFKNLREFVFKNIDGYFKIYSKHTPINLVRDLPQGFSALEPLVDLPIGINITRFQTLLALHRSYLTPGDSSSGWTAGAAAYYVGYLQPRTFLLKYNENGTITDAVDCALDPLSETKCTLKSFTVEKGIYQTSNFRVQPTESIVRFPNITNLCPFGEVFNATRFASVYAWNRKRISNCVADYSVLYNSASFSTFKCYGVSPTKLNDLCFTNVYADSFVIRGDEVRQIAPGQTGKIADYNYKLPDDFTGCVIAWNSNNLDSKVGGNYNYLYRLFRKSNLKPFERDISTEIYQAGSTPCNGVEGFNCYFPLQSYGFQPTNGVGYQPYRVVVLSFELLHAPATVCGPKKSTNLVKNKCVNFNFNGLTGTGVLTESNKKFLPFQQFGRDIADTTDAVRDPQTLEILDITPCSFGGVSVITPGTNTSNQVAVLYQDVNCTEVPVAIHADQLTPTWRVYSTGSNVFQTRAGCLIGAEHVNNSYECDIPIGAGICASYQTQTNSPGSASSVASQSIIAYTMSLGAENSVAYSNNSIAIPTNFTISVTTEILPVSMTKTSVDCTMYICGDSTECSNLLLQYGSFCTQLNRALTGIAVEQDKNTQEVFAQVKQIYKTPPIKDFGGFNFSQILPDPSKPSKRSFIEDLLFNKVTLADAGFIKQYGDCLGDIAARDLICAQKFNGLTVLPPLLTDEMIAQYTSALLAGTITSGWTFGAGAALQIPFAMQMAYRFNGIGVTQNVLYENQKLIANQFNSAIGKIQDSLSSTASALGKLQDVVNQNAQALNTLVKQLSSNFGAISSVLNDILSRLDPPEAEVQIDRLITGRLQSLQTYVTQQLIRAAEIRASANLAATKMSECVLGQSKRVDFCGKGYHLMSFPQSAPHGVVFLHVTYVPAQEKNFTTAPAICHDGKAHFPREGVFVSNGTHWFVTQRNFYEPQIITTDNTFVSGNCDVVIGIVNNTVYDPLQSELDSIKEELDKIHKNLDSIKEELDKIHKNGSGGSGDIIKLLNEQVNKEMQSSNLYMSMSSWCYTHSLDGAGLFLFDHAAEEYEHAKKLIIFLNENNVPVQLTSISAPEHKFEGLTQIFQKAYEHEQHISESINNIVDHAIKSKDHATFNFLQWYVAEQHEEEVLFKDILDKIELIGNENHGLYLADQYVKGIAKSRKSGS

SEQ ID NO: 78 - protein, 1328 aa, Artificial Sequence
  Description of Artificial Sequence: Synthetic polypeptide
VNLTTRTQLPPAYTNSFTRGVYYPDKVFRSSVLHSTQDLFLPFFSNVTWFHAIHVSGTNGTKRFDNPVLPFNDGVYFASTEKSNIIRGWIFGTTLDSKTQSLLIVNNATNVVIKVCEFQFCNDPFLGVYYHKNNKSWMESEFRVYSSANNCTFEYVSQPFLMDLEGKQGNFKNLREFVFKNIDGYFKIYSKHTPINLVRDLPQGFSALEPLVDLPIGINITRFQTLLALHRSYLTPGDSSSGWTAGAAAYYVGYLQPRTFLLKYNENGTITDAVDCALDPLSETKCTLKSFTVEKGIYQTSNFRVQPTESIVRFPNITNLCPFGEVFNATRFASVYAWNRKRISNCVADYSVLYNSASFSTFKCYGVSPTKLNDLCFTNVYADSFVIRGDEVRQIAPGQTGKIADYNYKLPDDFTGCVIAWNSNNLDSKVGGNYNYLYRLFRKSNLKPFERDISTEIYQAGSTPCNGVEGFNCYFPLQSYGFQPTNGVGYQPYRVVVLSFELLHAPATVCGPKKSTNLVKNKCVNFNFNGLTGTGVLTESNKKFLPFQQFGRDIADTTDAVRDPQTLEILDITPCSFGGVSVITPGTNTSNQVAVLYQDVNCTEVPVAIHADQLTPTWRVYSTGSNVFQTRAGCLIGAEHVNNSYECDIPIGAGICASYQTQTNSPGSASSVASQSIIAYTMSLGAENSVAYSNNSIAIPTNFTISVTTEILPVSMTKTSVDCTMYICGDSTECSNLLLQYGSFCTQLNRALTGIAVEQDKNTQEVFAQVKQIYKTPPIKDFGGFNFSQILPDPSKPSKRSFIEDLLFNKVTLADAGFIKQYGDCLGDIAARDLICAQKFNGLTVLPPLLTDEMIAQYTSALLAGTITSGWTFGAGAALQIPFAMQMAYRFNGIGVTQNVLYENQKLIANQFNSAIGKIQDSLSSTASALGKLQDVVNQNAQALNTLVKQLSSNFGAISSVLNDILSRLDPPEAEVQIDRLITGRLQSLQTYVTQQLIRAAEIRASANLAATKMSECVLGQSKRVDFCGKGYHLMSFPQSAPHGVVFLHVTYVPAQEKNFTTAPAICHDGKAHFPREGVFVSNGTHWFVTQRNFYEPQIITTDNTFVSGNCDVVIGIVNNTVYDPLQSEIDSIKEEIDKIHKNIDSIKEEIDKIHKNGSGGSGDIIKLLNEQVNKEMQSSNLYMSMSSWCYTHSLDGAGLFLFDHAAEEYEHAKKLIIFLNENNVPVQLTSISAPEHKFEGLTQIFQKAYEHEQHISESINNIVDHAIKSKDHATFNFLQWYVAEQHEEEVLFKDILDKIELIGNENHGLYLADQYVKGIAKSRKSGS

SEQ ID NO: 79 - protein, 1345 aa, Artificial Sequence
  Description of Artificial Sequence: Synthetic polypeptide
VNLTTRTQLPPAYTNSFTRGVYYPDKVFRSSVLHSTQDLFLPFFSNVTWFHAIHVSGTNGTKRFDNPVLPFNDGVYFASTEKSNIIRGWIFGTTLDSKTQSLLIVNNATNVVIKVCEFQFCNDPFLGVYYHKNNKSWMESEFRVYSSANNCTFEYVSQPFLMDLEGKQGNFKNLREFVFKNIDGYFKIYSKHTPINLVRDLPQGFSALEPLVDLPIGINITRFQTLLALHRSYLTPGDSSSGWTAGAAAYYVGYLQPRTFLLKYNENGTITDAVDCALDPLSETKCTLKSFTVEKGIYQTSNFRVQPTESIVRFPNITNLCPFGEVFNATRFASVYAWNRKRISNCVADYSVLYNSASFSTFKCYGVSPTKLNDLCFTNVYADSFVIRGDEVRQIAPGQTGKIADYNYKLPDDFTGCVIAWNSNNLDSKVGGNYNYLYRLFRKSNLKPFERDISTEIYQAGSTPCNGVEGFNCYFPLQSYGFQPTNGVGYQPYRVVVLSFELLHAPATVCGPKKSTNLVKNKCVNFNFNGLTGTGVLTESNKKFLPFQQFGRDIADTTDAVRDPQTLEILDITPCSFGGVSVITPGTNTSNQVAVLYQDVNCTEVPVAIHADQLTPTWRVYSTGSNVFQTRAGCLIGAEHVNNSYECDIPIGAGICASYQTQTNSPGSASSVASQSIIAYTMSLGAENSVAYSNNSIAIPTNFTISVTTEILPVSMTKTSVDCTMYICGDSTECSNLLLQYGSFCTQLNRALTGIAVEQDKNTQEVFAQVKQIYKTPPIKDFGGFNFSQILPDPSKPSKRSFIEDLLFNKVTLADAGFIKQYGDCLGDIAARDLICAQKFNGLTVLPPLLTDEMIAQYTSALLAGTITSGWTFGAGAALQIPFAMQMAYRFNGIGVTQNVLYENQKLIANQFNSAIGKIQDSLSSTASALGKLQDVVNQNAQALNTLVKQLSSNFGAISSVLNDILSRLDPPEAEVQIDRLITGRLQSLQTYVTQQLIRAAEIRASANLAATKMSECVLGQSKRVDFCGKGYHLMSFPQSAPHGVVFLHVTYVPAQEKNFTTAPAICHDGKAHFPREGVFVSNGTHWFVTQRNFYEPQIITTDNTFVSGNCDVVIGIVNNTVYDPLQSELDSIKEELDKIHKNMKQIEDKIEEILSKIYHIENEIARIKKLIGRGSGGSGDIIKLLNEQVNKEMQSSNLYMSMSSWCYTHSLDGAGLFLFDHAAEEYEHAKKLIIFLNENNVPVQLTSISAPEHKFEGLTQIFQKAYEHEQHISESINNIVDHAIKSKDHATFNFLQWYVAEQHEEEVLFKDILDKIELIGNENHGLYLADQYVKGIAKSRKSGS

SEQ ID NO: 80 - protein, 1295 aa, Artificial Sequence
  Description of Artificial Sequence: Synthetic polypeptide
SSQCVNLTTRTQLPPAYTNSFTRGVYYPDKVFRSSVLHSTQDLFLPFFSNVTWFHAIHVSGTNGTKRFDNPVLPFNDGVYFASTEKSNIIRGWIFGTTLDSKTQSLLIVNNATNVVIKVCEFQFCNDPFLGVYYHKNNKSWMESEFRVYSSANNCTFEYVSQPFLMDLEGKQGNFKNLREFVFKNIDGYFKIYSKHTPINLVRDLPQGFSALEPLVDLPIGINITRFQTLLALHRSYLTPGDSSSGWTAGAAAYYVGYLQPRTFLLKYNENGTITDAVDCALDPLSETKCTLKSFTVEKGIYQTSNFRVQPTESIVRFPNITNLCPFGEVFNATRFASVYAWNRKRISNCVADYSVLYNSASFSTFKCYGVSPTKLNDLCFTNVYADSFVIRGDEVRQIAPGQTGKIADYNYKLPDDFTGCVIAWNSNNLDSKVGGNYNYLYRLFRKSNLKPFERDISTEIYQAGSTPCNGVEGFNCYFPLQSYGFQPTNGVGYQPYRVVVLSFELLHAPATVCGPKKSTNLVKNKCVNFNFNGLTGTGVLTESNKKFLPFQQFGRDIADTTDAVRDPQTLEILDITPCSFGGVSVITPGTNTSNQVAVLYQDVNCTEVPVAIHADQLTPTWRVYSTGSNVFQTRAGCLIGAEHVNNSYECDIPIGAGICASYQTQTNSPGSASSVASQSIIAYTMSLGAENSVAYSNNSIAIPTNFTISVTTEILPVSMTKTSVDCTMYICGDSTECSNLLLQYGSFCTQLNRALTGIAVEQDKNTQEVFAQVKQIYKTPPIKDFGGFNFSQILPDPSKPSKRSFIEDLLFNKVTLADAGFIKQYGDCLGDIAARDLICAQKFNGLTVLPPLLTDEMIAQYTSALLAGTITSGWTFGAGAALQIPFAMQMAYRFNGIGVTQNVLYENQKLIANQFNSAIGKIQDSLSSTASALGKLQDVVNQNAQALNTLVKQLSSNFGAISSVLNDILSRLDPPEAEVQIDRLITGRLQSLQTYVTQQLIRAAEIRASANLAATKMSECVLGQSKRVDFCGKGYHLMSFPQSAPHGVVFLHVTYVPAQEKNFTTAPAICHDGKAHFPREGVFVSNGTHWFVTQRNFYEPQIITTDNTFVSGNCDVVIGIVNNTVGSGGDIIKLLNEQVNKEMQSSNLYMSMSSWCYTHSLDGAGLFLFDHAAEEYEHAKKLIIFLNENNVPVQLTSISAPEHKFEGLTQIFQKAYEHEQHISESINNIVDHAIKSKDHATFNFLQWYVAEQHEEEVLFKDILDKIELIGNENHGLYLADQYVKGIAKSRKSGS

SEQ ID NO: 81 - protein, 1297 aa, Artificial Sequence
  Description of Artificial Sequence: Synthetic polypeptide
SSQCVNLTTRTQLPPAYTNSFTRGVYYPDKVFRSSVLHSTQDLFLPFFSNVTWFHAIHVSGTNGTKRFDNPVLPFNDGVYFASTEKSNIIRGWIFGTTLDSKTQSLLIVNNATNVVIKVCEFQFCNDPFLGVYYHKNNKSWMESEFRVYSSANNCTFEYVSQPFLMDLEGKQGNFKNLREFVFKNIDGYFKIYSKHTPINLVRDLPQGFSALEPLVDLPIGINITRFQTLLALHRSYLTPGDSSSGWTAGAAAYYVGYLQPRTFLLKYNENGTITDAVDCALDPLSETKCTLKSFTVEKGIYQTSNFRVQPTESIVRFPNITNLCPFGEVFNATRFASVYAWNRKRISNCVADYSVLYNSASFSTFKCYGVSPTKLNDLCFTNVYADSFVIRGDEVRQIAPGQTGKIADYNYKLPDDFTGCVIAWNSNNLDSKVGGNYNYLYRLFRKSNLKPFERDISTEIYQAGSTPCNGVEGFNCYFPLQSYGFQPTNGVGYQPYRVVVLSFELLHAPATVCGPKKSTNLVKNKCVNFNFNGLTGTGVLTESNKKFLPFQQFGRDIADTTDAVRDPQTLEILDITPCSFGGVSVITPGTNTSNQVAVLYQDVNCTEVPVAIHADQLTPTWRVYSTGSNVFQTRAGCLIGAEHVNNSYECDIPIGAGICASYQTQTNSPGSASSVASQSIIAYTMSLGAENSVAYSNNSIAIPTNFTISVTTEILPVSMTKTSVDCTMYICGDSTECSNLLLQYGSFCTQLNRALTGIAVEQDKNTQEVFAQVKQIYKTPPIKDFGGFNFSQILPDPSKPSKRSFIEDLLFNKVTLADAGFIKQYGDCLGDIAARDLICAQKFNGLTVLPPLLTDEMIAQYTSALLAGTITSGWTFGAGAALQIPFAMQMAYRFNGIGVTQNVLYENQKLIANQFNSAIGKIQDSLSSTASALGKLQDVVNQNAQALNTLVKQLSSNFGAISSVLNDILSRLDPPEAEVQIDRLITGRLQSLQTYVTQQLIRAAEIRASANLAATKMSECVLGQSKRVDFCGKGYHLMSFPQSAPHGVVFLHVTYVPAQEKNFTTAPAICHDGKAHFPREGVFVSNGTHWFVTQRNFYEPQIITTDNTFVSGNCDVVIGIVNNTVGSGGSGDIIKLLNEQVNKEMQSSNLYMSMSSWCYTHSLDGAGLFLFDHAAEEYEHAKKLIIFLNENNVPVQLTSISAPEHKFEGLTQIFQKAYEHEQHISESINNIVDHAIKSKDHATFNFLQWYVAEQHEEEVLFKDILDKIELIGNENHGLYLADQYVKGIAKSRKSGS

SEQ ID NO: 82 - protein, 1368 aa, Artificial Sequence
  Description of Artificial Sequence: Synthetic polypeptide
SSQCVNLTTRTQLPPAYTNSFTRGVYYPDKVFRSSVLHSTQDLFLPFFSNVTWFHAIHVSGTNGTKRFDNPVLPFNDGVYFASTEKSNIIRGWIFGTTLDSKTQSLLIVNNATNVVIKVCEFQFCNDPFLGVYYHKNNKSWMESEFRVYSSANNCTFEYVSQPFLMDLEGKQGNFKNLREFVFKNIDGYFKIYSKHTPINLVRDLPQGFSALEPLVDLPIGINITRFQTLLALHRSYLTPGDSSSGWTAGAAAYYVGYLQPRTFLLKYNENGTITDAVDCALDPLSETKCTLKSFTVEKGIYQTSNFRVQPTESIVRFPNITNLCPFGEVFNATRFASVYAWNRKRISNCVADYSVLYNSASFSTFKCYGVSPTKLNDLCFTNVYADSFVIRGDEVRQIAPGQTGKIADYNYKLPDDFTGCVIAWNSNNLDSKVGGNYNYLYRLFRKSNLKPFERDISTEIYQAGSTPCNGVEGFNCYFPLQSYGFQPTNGVGYQPYRVVVLSFELLHAPATVCGPKKSTNLVKNKCVNFNFNGLTGTGVLTESNKKFLPFQQFGRDIADTTDAVRDPQTLEILDITPCSFGGVSVITPGTNTSNQVAVLYQDVNCTEVPVAIHADQLTPTWRVYSTGSNVFQTRAGCLIGAEHVNNSYECDIPIGAGICASYQTQTNSPGSASSVASQSIIAYTMSLGAENSVAYSNNSIAIPTNFTISVTTEILPVSMTKTSVDCTMYICGDSTECSNLLLQYGSFCTQLNRALTGIAVEQDKNTQEVFAQVKQIYKTPPIKDFGGFNFSQILPDPSKPSKRSFIEDLLFNKVTLADAGFIKQYGDCLGDIAARDLICAQKFNGLTVLPPLLTDEMIAQYTSALLAGTITSGWTFGAGAALQIPFAMQMAYRFNGIGVTQNVLYENQKLIANQFNSAIGKIQDSLSSTASALGKLQDVVNQNAQALNTLVKQLSSNFGAISSVLNDILSRLDPPEAEVQIDRLITGRLQSLQTYVTQQLIRAAEIRASANLAATKMSECVLGQSKRVDFCGKGYHLMSFPQSAPHGVVFLHVTYVPAQEKNFTTAPAICHDGKAHFPREGVFVSNGTHWFVTQRNFYEPQIITTDNTFVSGNCDVVIGIVNNTVYDPLQPELDSFKEELDKYFKNHTSPDVDLGDISGINASVVNIQKEIDRLNEVAKNLNESLIDLQELGKYEQGSGGSGDIIKLLNEQVNKEMQSSNLYMSMSSWCYTHSLDGAGLFLFDHAAEEYEHAKKLIIFLNENNVPVQLTSISAPEHKFEGLTQIFQKAYEHEQHISESINNIVDHAIKSKDHATFNFLQWYVAEQHEEEVLFKDILDKIELIGNENHGLYLADQYVKGIAKSRKSGS

SEQ ID NO: 83 - protein, 1404 aa, Artificial Sequence
  Description of Artificial Sequence: Synthetic polypeptide
SSQCVNLTTRTQLPPAYTNSFTRGVYYPDKVFRSSVLHSTQDLFLPFFSNVTWFHAIHVSGTNGTKRFDNPVLPFNDGVYFASTEKSNIIRGWIFGTTLDSKTQSLLIVNNATNVVIKVCEFQFCNDPFLGVYYHKNNKSWMESEFRVYSSANNCTFEYVSQPFLMDLEGKQGNFKNLREFVFKNIDGYFKIYSKHTPINLVRDLPQGFSALEPLVDLPIGINITRFQTLLALHRSYLTPGDSSSGWTAGAAAYYVGYLQPRTFLLKYNENGTITDAVDCALDPLSETKCTLKSFTVEKGIYQTSNFRVQPTESIVRFPNITNLCPFGEVFNATRFASVYAWNRKRISNCVADYSVLYNSASFSTFKCYGVSPTKLNDLCFTNVYADSFVIRGDEVRQIAPGQTGKIADYNYKLPDDFTGCVIAWNSNNLDSKVGGNYNYLYRLFRKSNLKPFERDISTEIYQAGSTPCNGVEGFNCYFPLQSYGFQPTNGVGYQPYRVVVLSFELLHAPATVCGPKKSTNLVKNKCVNFNFNGLTGTGVLTESNKKFLPFQQFGRDIADTTDAVRDPQTLEILDITPCSFGGVSVITPGTNTSNQVAVLYQDVNCTEVPVAIHADQLTPTWRVYSTGSNVFQTRAGCLIGAEHVNNSYECDIPIGAGICASYQTQTNSPGSASSVASQSIIAYTMSLGAENSVAYSNNSIAIPTNFTISVTTEILPVSMTKTSVDCTMYICGDSTECSNLLLQYGSFCTQLNRALTGIAVEQDKNTQEVFAQVKQIYKTPPIKDFGGFNFSQILPDPSKPSKRSFIEDLLFNKVTLADAGFIKQYGDCLGDIAARDLICAQKFNGLTVLPPLLTDEMIAQYTSALLAGTITSGWTFGAGAALQIPFAMQMAYRFNGIGVTQNVLYENQKLIANQFNSAIGKIQDSLSSTASALGKLQDVVNQNAQALNTLVKQLSSNFGAISSVLNDILSRLDPPEAEVQIDRLITGRLQSLQTYVTQQLIRAAEIRASANLAATKMSECVLGQSKRVDFCGKGYHLMSFPQSAPHGVVFLHVTYVPAQEKNFTTAPAICHDGKAHFPREGVFVSNGTHWFVTQRNFYEPQIITTDNTFVSGNCDVVIGIVNNTVYDPLQPELDSFKEELDKYFKNHTSPDVDLGDISGINASVVNIQKEIDRLNEVAKNLNESLIDLQELGKYEQGSGGEMKQIEDKIEEILSKIYHIENEIARIKKLIGRGSGGSGDIIKLLNEQVNKEMQSSNLYMSMSSWCYTHSLDGAGLFLFDHAAEEYEHAKKLIIFLNENNVPVQLTSISAPEHKFEGLTQIFQKAYEHEQHISESINNIVDHAIKSKDHATFNFLQWYVAEQHEEEVLFKDILDKIELIGNENHGLYLADQYVKGIAKSRKSGS

SEQ ID NO: 84 - protein, 1314 aa, Artificial Sequence
  Description of Artificial Sequence: Synthetic polypeptide
SSQCVNLTTRTQLPPAYTNSFTRGVYYPDKVFRSSVLHSTQDLFLPFFSNVTWFHAIHVSGTNGTKRFDNPVLPFNDGVYFASTEKSNIIRGWIFGTTLDSKTQSLLIVNNATNVVIKVCEFQFCNDPFLGVYYHKNNKSWMESEFRVYSSANNCTFEYVSQPFLMDLEGKQGNFKNLREFVFKNIDGYFKIYSKHTPINLVRDLPQGFSALEPLVDLPIGINITRFQTLLALHRSYLTPGDSSSGWTAGAAAYYVGYLQPRTFLLKYNENGTITDAVDCALDPLSETKCTLKSFTVEKGIYQTSNFRVQPTESIVRFPNITNLCPFGEVFNATRFASVYAWNRKRISNCVADYSVLYNSASFSTFKCYGVSPTKLNDLCFTNVYADSFVIRGDEVRQIAPGQTGKIADYNYKLPDDFTGCVIAWNSNNLDSKVGGNYNYLYRLFRKSNLKPFERDISTEIYQAGSTPCNGVEGFNCYFPLQSYGFQPTNGVGYQPYRVVVLSFELLHAPATVCGPKKSTNLVKNKCVNFNFNGLTGTGVLTESNKKFLPFQQFGRDIADTTDAVRDPQTLEILDITPCSFGGVSVITPGTNTSNQVAVLYQDVNCTEVPVAIHADQLTPTWRVYSTGSNVFQTRAGCLIGAEHVNNSYECDIPIGAGICASYQTQTNSPGSASSVASQSIIAYTMSLGAENSVAYSNNSIAIPTNFTISVTTEILPVSMTKTSVDCTMYICGDSTECSNLLLQYGSFCTQLNRALTGIAVEQDKNTQEVFAQVKQIYKTPPIKDFGGFNFSQILPDPSKPSKRSFIEDLLFNKVTLADAGFIKQYGDCLGDIAARDLICAQKFNGLTVLPPLLTDEMIAQYTSALLAGTITSGWTFGAGAALQIPFAMQMAYRFNGIGVTQNVLYENQKLIANQFNSAIGKIQDSLSSTASALGKLQDVVNQNAQALNTLVKQLSSNFGAISSVLNDILSRLDPPEAEVQIDRLITGRLQSLQTYVTQQLIRAAEIRASANLAATKMSECVLGQSKRVDFCGKGYHLMSFPQSAPHGVVFLHVTYVPAQEKNFTTAPAICHDGKAHFPREGVFVSNGTHWFVTQRNFYEPQIITTDNTFVSGNCDVVIGIVNNTVYDPLQPELDSFKEELDKGSGGSGDIIKLLNEQVNKEMQSSNLYMSMSSWCYTHSLDGAGLFLFDHAAEEYEHAKKLIIFLNENNVPVQLTSISAPEHKFEGLTQIFQKAYEHEQHISESINNIVDHAIKSKDHATFNFLQWYVAEQHEEEVLFKDILDKIELIGNENHGLYLADQYVKGIAKSRKSGS

SEQ ID NO: 85 - protein, 1318 aa, Artificial Sequence
  Description of Artificial Sequence: Synthetic polypeptide
SSQCVNLTTRTQLPPAYTNSFTRGVYYPDKVFRSSVLHSTQDLFLPFFSNVTWFHAIHVSGTNGTKRFDNPVLPFNDGVYFASTEKSNIIRGWIFGTTLDSKTQSLLIVNNATNVVIKVCEFQFCNDPFLGVYYHKNNKSWMESEFRVYSSANNCTFEYVSQPFLMDLEGKQGNFKNLREFVFKNIDGYFKIYSKHTPINLVRDLPQGFSALEPLVDLPIGINITRFQTLLALHRSYLTPGDSSSGWTAGAAAYYVGYLQPRTFLLKYNENGTITDAVDCALDPLSETKCTLKSFTVEKGIYQTSNFRVQPTESIVRFPNITNLCPFGEVFNATRFASVYAWNRKRISNCVADYSVLYNSASFSTFKCYGVSPTKLNDLCFTNVYADSFVIRGDEVRQIAPGQTGKIADYNYKLPDDFTGCVIAWNSNNLDSKVGGNYNYLYRLFRKSNLKPFERDISTEIYQAGSTPCNGVEGFNCYFPLQSYGFQPTNGVGYQPYRVVVLSFELLHAPATVCGPKKSTNLVKNKCVNFNFNGLTGTGVLTESNKKFLPFQQFGRDIADTTDAVRDPQTLEILDITPCSFGGVSVITPGTNTSNQVAVLYQDVNCTEVPVAIHADQLTPTWRVYSTGSNVFQTRAGCLIGAEHVNNSYECDIPIGAGICASYQTQTNSPGSASSVASQSIIAYTMSLGAENSVAYSNNSIAIPTNFTISVTTEILPVSMTKTSVDCTMYICGDSTECSNLLLQYGSFCTQLNRALTGIAVEQDKNTQEVFAQVKQIYKTPPIKDFGGFNFSQILPDPSKPSKRSFIEDLLFNKVTLADAGFIKQYGDCLGDIAARDLICAQKFNGLTVLPPLLTDEMIAQYTSALLAGTITSGWTFGAGAALQIPFAMQMAYRFNGIGVTQNVLYENQKLIANQFNSAIGKIQDSLSSTASALGKLQDVVNQNAQALNTLVKQLSSNFGAISSVLNDILSRLDPPEAEVQIDRLITGRLQSLQTYVTQQLIRAAEIRASANLAATKMSECVLGQSKRVDFCGKGYHLMSFPQSAPHGVVFLHVTYVPAQEKNFTTAPAICHDGKAHFPREGVFVSNGTHWFVTQRNFYEPQIITTDNTFVSGNCDVVIGIVNNTVYDPLQSELDSIKEELDKIHKNGSGGSGDIIKLLNEQVNKEMQSSNLYMSMSSWCYTHSLDGAGLFLFDHAAEEYEHAKKLIIFLNENNVPVQLTSISAPEHKFEGLTQIFQKAYEHEQHISESINNIVDHAIKSKDHATFNFLQWYVAEQHEEEVLFKDILDKIELIGNENHGLYLADQYVKGIAKSRKSGS

SEQ ID NO: 86 - protein, 1318 aa, Artificial Sequence
  Description of Artificial Sequence: Synthetic polypeptide
SSQCVNLTTRTQLPPAYTNSFTRGVYYPDKVFRSSVLHSTQDLFLPFFSNVTWFHAIHVSGTNGTKRFDNPVLPFNDGVYFASTEKSNIIRGWIFGTTLDSKTQSLLIVNNATNVVIKVCEFQFCNDPFLGVYYHKNNKSWMESEFRVYSSANNCTFEYVSQPFLMDLEGKQGNFKNLREFVFKNIDGYFKIYSKHTPINLVRDLPQGFSALEPLVDLPIGINITRFQTLLALHRSYLTPGDSSSGWTAGAAAYYVGYLQPRTFLLKYNENGTITDAVDCALDPLSETKCTLKSFTVEKGIYQTSNFRVQPTESIVRFPNITNLCPFGEVFNATRFASVYAWNRKRISNCVADYSVLYNSASFSTFKCYGVSPTKLNDLCFTNVYADSFVIRGDEVRQIAPGQTGKIADYNYKLPDDFTGCVIAWNSNNLDSKVGGNYNYLYRLFRKSNLKPFERDISTEIYQAGSTPCNGVEGFNCYFPLQSYGFQPTNGVGYQPYRVVVLSFELLHAPATVCGPKKSTNLVKNKCVNFNFNGLTGTGVLTESNKKFLPFQQFGRDIADTTDAVRDPQTLEILDITPCSFGGVSVITPGTNTSNQVAVLYQDVNCTEVPVAIHADQLTPTWRVYSTGSNVFQTRAGCLIGAEHVNNSYECDIPIGAGICASYQTQTNSPGSASSVASQSIIAYTMSLGAENSVAYSNNSIAIPTNFTISVTTEILPVSMTKTSVDCTMYICGDSTECSNLLLQYGSFCTQLNRALTGIAVEQDKNTQEVFAQVKQIYKTPPIKDFGGFNFSQILPDPSKPSKRSFIEDLLFNKVTLADAGFIKQYGDCLGDIAARDLICAQKFNGLTVLPPLLTDEMIAQYTSALLAGTITSGWTFGAGAALQIPFAMQMAYRFNGIGVTQNVLYENQKLIANQFNSAIGKIQDSLSSTASALGKLQDVVNQNAQALNTLVKQLSSNFGAISSVLNDILSRLDPPEAEVQIDRLITGRLQSLQTYVTQQLIRAAEIRASANLAATKMSECVLGQSKRVDFCGKGYHLMSFPQSAPHGVVFLHVTYVPAQEKNFTTAPAICHDGKAHFPREGVFVSNGTHWFVTQRNFYEPQIITTDNTFVSGNCDVVIGIVNNTVYDPLQSEIDSIKEEIDKIHKNGSGGSGDIIKLLNEQVNKEMQSSNLYMSMSSWCYTHSLDGAGLFLFDHAAEEYEHAKKLIIFLNENNVPVQLTSISAPEHKFEGLTQIFQKAYEHEQHISESINNIVDHAIKSKDHATFNFLQWYVAEQHEEEVLFKDILDKIELIGNENHGLYLADQYVKGIAKSRKSGS

SEQ ID NO: 87 - protein, 1332 aa, Artificial Sequence
  Description of Artificial Sequence: Synthetic polypeptide
SSQCVNLTTRTQLPPAYTNSFTRGVYYPDKVFRSSVLHSTQDLFLPFFSNVTWFHAIHVSGTNGTKRFDNPVLPFNDGVYFASTEKSNIIRGWIFGTTLDSKTQSLLIVNNATNVVIKVCEFQFCNDPFLGVYYHKNNKSWMESEFRVYSSANNCTFEYVSQPFLMDLEGKQGNFKNLREFVFKNIDGYFKIYSKHTPINLVRDLPQGFSALEPLVDLPIGINITRFQTLLALHRSYLTPGDSSSGWTAGAAAYYVGYLQPRTFLLKYNENGTITDAVDCALDPLSETKCTLKSFTVEKGIYQTSNFRVQPTESIVRFPNITNLCPFGEVFNATRFASVYAWNRKRISNCVADYSVLYNSASFSTFKCYGVSPTKLNDLCFTNVYADSFVIRGDEVRQIAPGQTGKIADYNYKLPDDFTGCVIAWNSNNLDSKVGGNYNYLYRLFRKSNLKPFERDISTEIYQAGSTPCNGVEGFNCYFPLQSYGFQPTNGVGYQPYRVVVLSFELLHAPATVCGPKKSTNLVKNKCVNFNFNGLTGTGVLTESNKKFLPFQQFGRDIADTTDAVRDPQTLEILDITPCSFGGVSVITPGTNTSNQVAVLYQDVNCTEVPVAIHADQLTPTWRVYSTGSNVFQTRAGCLIGAEHVNNSYECDIPIGAGICASYQTQTNSPGSASSVASQSIIAYTMSLGAENSVAYSNNSIAIPTNFTISVTTEILPVSMTKTSVDCTMYICGDSTECSNLLLQYGSFCTQLNRALTGIAVEQDKNTQEVFAQVKQIYKTPPIKDFGGFNFSQILPDPSKPSKRSFIEDLLFNKVTLADAGFIKQYGDCLGDIAARDLICAQKFNGLTVLPPLLTDEMIAQYTSALLAGTITSGWTFGAGAALQIPFAMQMAYRFNGIGVTQNVLYENQKLIANQFNSAIGKIQDSLSSTASALGKLQDVVNQNAQALNTLVKQLSSNFGAISSVLNDILSRLDPPEAEVQIDRLITGRLQSLQTYVTQQLIRAAEIRASANLAATKMSECVLGQSKRVDFCGKGYHLMSFPQSAPHGVVFLHVTYVPAQEKNFTTAPAICHDGKAHFPREGVFVSNGTHWFVTQRNFYEPQIITTDNTFVSGNCDVVIGIVNNTVYDPLQSELDSIKEELDKIHKNLDSIKEELDKIHKNGSGGSGDIIKLLNEQVNKEMQSSNLYMSMSSWCYTHSLDGAGLFLFDHAAEEYEHAKKLIIFLNENNVPVQLTSISAPEHKFEGLTQIFQKAYEHEQHISESINNIVDHAIKSKDHATFNFLQWYVAEQHEEEVLFKDILDKIELIGNENHGLYLADQYVKGIAKSRKSGS

SEQ ID NO: 88 - protein, 1332 aa, Artificial Sequence
  Description of Artificial Sequence: Synthetic polypeptide
SSQCVNLTTRTQLPPAYTNSFTRGVYYPDKVFRSSVLHSTQDLFLPFFSNVTWFHAIHVSGTNGTKRFDNPVLPFNDGVYFASTEKSNIIRGWIFGTTLDSKTQSLLIVNNATNVVIKVCEFQFCNDPFLGVYYHKNNKSWMESEFRVYSSANNCTFEYVSQPFLMDLEGKQGNFKNLREFVFKNIDGYFKIYSKHTPINLVRDLPQGFSALEPLVDLPIGINITRFQTLLALHRSYLTPGDSSSGWTAGAAAYYVGYLQPRTFLLKYNENGTITDAVDCALDPLSETKCTLKSFTVEKGIYQTSNFRVQPTESIVRFPNITNLCPFGEVFNATRFASVYAWNRKRISNCVADYSVLYNSASFSTFKCYGVSPTKLNDLCFTNVYADSFVIRGDEVRQIAPGQTGKIADYNYKLPDDFTGCVIAWNSNNLDSKVGGNYNYLYRLFRKSNLKPFERDISTEIYQAGSTPCNGVEGFNCYFPLQSYGFQPTNGVGYQPYRVVVLSFELLHAPATVCGPKKSTNLVKNKCVNFNFNGLTGTGVLTESNKKFLPFQQFGRDIADTTDAVRDPQTLEILDITPCSFGGVSVITPGTNTSNQVAVLYQDVNCTEVPVAIHADQLTPTWRVYSTGSNVFQTRAGCLIGAEHVNNSYECDIPIGAGICASYQTQTNSPGSASSVASQSIIAYTMSLGAENSVAYSNNSIAIPTNFTISVTTEILPVSMTKTSVDCTMYICGDSTECSNLLLQYGSFCTQLNRALTGIAVEQDKNTQEVFAQVKQIYKTPPIKDFGGFNFSQILPDPSKPSKRSFIEDLLFNKVTLADAGFIKQYGDCLGDIAARDLICAQKFNGLTVLPPLLTDEMIAQYTSALLAGTITSGWTFGAGAALQIPFAMQMAYRFNGIGVTQNVLYENQKLIANQFNSAIGKIQDSLSSTASALGKLQDVVNQNAQALNTLVKQLSSNFGAISSVLNDILSRLDPPEAEVQIDRLITGRLQSLQTYVTQQLIRAAEIRASANLAATKMSECVLGQSKRVDFCGKGYHLMSFPQSAPHGVVFLHVTYVPAQEKNFTTAPAICHDGKAHFPREGVFVSNGTHWFVTQRNFYEPQIITTDNTFVSGNCDVVIGIVNNTVYDPLQSEIDSIKEEIDKIHKNIDSIKEEIDKIHKNGSGGSGDIIKLLNEQVNKEMQSSNLYMSMSSWCYTHSLDGAGLFLFDHAAEEYEHAKKLIIFLNENNVPVQLTSISAPEHKFEGLTQIFQKAYEHEQHISESINNIVDHAIKSKDHATFNFLQWYVAEQHEEEVLFKDILDKIELIGNENHGLYLADQYVKGIAKSRKSGS

SEQ ID NO: 89 - protein, 1349 aa, Artificial Sequence
  Description of Artificial Sequence: Synthetic polypeptide
SSQCVNLTTRTQLPPAYTNSFTRGVYYPDKVFRSSVLHSTQDLFLPFFSNVTWFHAIHVSGTNGTKRFDNPVLPFNDGVYFASTEKSNIIRGWIFGTTLDSKTQSLLIVNNATNVVIKVCEFQFCNDPFLGVYYHKNNKSWMESEFRVYSSANNCTFEYVSQPFLMDLEGKQGNFKNLREFVFKNIDGYFKIYSKHTPINLVRDLPQGFSALEPLVDLPIGINITRFQTLLALHRSYLTPGDSSSGWTAGAAAYYVGYLQPRTFLLKYNENGTITDAVDCALDPLSETKCTLKSFTVEKGIYQTSNFRVQPTESIVRFPNITNLCPFGEVFNATRFASVYAWNRKRISNCVADYSVLYNSASFSTFKCYGVSPTKLNDLCFTNVYADSFVIRGDEVRQIAPGQTGKIADYNYKLPDDFTGCVIAWNSNNLDSKVGGNYNYLYRLFRKSNLKPFERDISTEIYQAGSTPCNGVEGFNCYFPLQSYGFQPTNGVGYQPYRVVVLSFELLHAPATVCGPKKSTNLVKNKCVNFNFNGLTGTGVLTESNKKFLPFQQFGRDIADTTDAVRDPQTLEILDITPCSFGGVSVITPGTNTSNQVAVLYQDVNCTEVPVAIHADQLTPTWRVYSTGSNVFQTRAGCLIGAEHVNNSYECDIPIGAGICASYQTQTNSPGSASSVASQSIIAYTMSLGAENSVAYSNNSIAIPTNFTISVTTEILPVSMTKTSVDCTMYICGDSTECSNLLLQYGSFCTQLNRALTGIAVEQDKNTQEVFAQVKQIYKTPPIKDFGGFNFSQILPDPSKPSKRSFIEDLLFNKVTLADAGFIKQYGDCLGDIAARDLICAQKFNGLTVLPPLLTDEMIAQYTSALLAGTITSGWTFGAGAALQIPFAMQMAYRFNGIGVTQNVLYENQKLIANQFNSAIGKIQDSLSSTASALGKLQDVVNQNAQALNTLVKQLSSNFGAISSVLNDILSRLDPPEAEVQIDRLITGRLQSLQTYVTQQLIRAAEIRASANLAATKMSECVLGQSKRVDFCGKGYHLMSFPQSAPHGVVFLHVTYVPAQEKNFTTAPAICHDGKAHFPREGVFVSNGTHWFVTQRNFYEPQIITTDNTFVSGNCDVVIGIVNNTVYDPLQSELDSIKEELDKIHKNMKQIEDKIEEILSKIYHIENEIARIKKLIGRGSGGSGDIIKLLNEQVNKEMQSSNLYMSMSSWCYTHSLDGAGLFLFDHAAEEYEHAKKLIIFLNENNVPVQLTSISAPEHKFEGLTQIFQKAYEHEQHISESINNIVDHAIKSKDHATFNFLQWYVAEQHEEEVLFKDILDKIELIGNENHGLYLADQYVKGIAKSRKSGS

SEQ ID NO: 90 - protein, 495 aa, Artificial Sequence
  Description of Artificial Sequence: Synthetic polypeptide
HHHHHHHHGPLEVLFQGPSSQCVNLTTRTQLPPAYTNSFTRGVYYPDKVFRSSVLHSTQDLFLPFFSNVTWFHAIHVSGTNGTKRFDNPVLPFNDGVYFASTEKSNIIRGWIFGTTLDSKTQSLLIVNNATNVVIKVCEFQFCNDPFLGVYYHKNNKSWMESEFRVYSSANNCTFEYVSQPFLMDLEGKQGNFKNLREFVFKNIDGYFKIYSKHTPINLVRDLPQGFSALEPLVDLPIGINITRFQTLLALHRSYLTPGDSSSGWTAGAAAYYVGYLQPRTFLLKYNENGTITDAVDCALDPLSETKCTLKSFTGSGGGGESQVRQQFSKDIEKLLNEQVNKEMQSSNLYMSMSSWCYTHSLDGAGLFLFDHAAEEYEHAKKLIIFLNENNVPVQLTSISAPEHKFEGLTQIFQKAYEHEQHISESINNIVDHAIKSKDHATFNFLQWYVAEQHEEEVLFKDILDKIELIGNENHGLYLADQYVKGIAKSRKSGS

SEQ ID NO: 91 - protein, 491 aa, Artificial Sequence
  Description of Artificial Sequence: Synthetic polypeptide
HHHHHHHHGPLEVLFQGPSSQCVNLTTRTQLPPAYTNSFTRGVYYPDKVFRSSVLHSTQDLFLPFFSNVTWFHAIHVSGTNGTKRFDNPVLPFNDGVYFASTEKSNIIRGWIFGTTLDSKTQSLLIVNNATNVVIKVCEFQFCNDPFLGVYYHKNNKSWMESEFRVYSSANNCTFEYVSQPFLMDLEGKQGNFKNLREFVFKNIDGYFKIYSKHTPINLVRDLPQGFSALEPLVDLPIGINITRFQTLLALHRSYLTPGDSSSGWTAGAAAYYVGYLQPRTFLLKYNENGTITDAVDCALDPKSETKCTDGSGGGGESQVRQQFSKDIEKLLNEQVNKEMQSSNLYMSMSSWCYTHSLDGAGLFLFDHAAEEYEHAKKLIIFLNENNVPVQLTSISAPEHKFEGLTQIFQKAYEHEQHISESINNIVDHAIKSKDHATFNFLQWYVAEQHEEEVLFKDILDKIELIGNENHGLYLADQYVKGIAKSRKSGS

SEQ ID NO: 92 - protein, 495 aa, Artificial Sequence
  Description of Artificial Sequence: Synthetic polypeptide
HHHHHHHHGPLEVLFQGPSSQCVNLTTRTQLPPAYTNSFTRGVYYPDKVFRSSVLHSTQDLFLPFFSNVTWFHAIHVSGTNGTKRFDNPVLPFNDGVYFASTEKSNIIRGWIFGTTLDSKTQSLLIVNNATNVVIKVCEFQFCNDPFLGVYYHKNNKSWMESEFRVYSSANNCTFEYVSQPFLMDLEGKQGNFKNLREFVFKNIDGYFKIYSKHTPINLVRDLPQGFSALEPLVDLPIGINITRFQTLLALHRSYLTPGDSSSGWTAGAAAYYVGYLQPRTFLLKYNENGTITDAVDCALDPKSETKCTDKSFTGSGGGGESQVRQQFSKDIEKLLNEQVNKEMQSSNLYMSMSSWCYTHSLDGAGLFLFDHAAEEYEHAKKLIIFLNENNVPVQLTSISAPEHKFEGLTQIFQKAYEHEQHISESINNIVDHAIKSKDHATFNFLQWYVAEQHEEEVLFKDILDKIELIGNENHGLYLADQYVKGIAKSRKSGS

SEQ ID NO: 93 - protein, 491 aa, Artificial Sequence
  Description of Artificial Sequence: Synthetic polypeptide
HHHHHHHHGPLEVLFQGPSSQCVNLTTRTQLPPAYTNSFTRGVYYPDKVFRSSVLHSTQDLFLPFFSNVTWFHAIHVSGTNGTKRFDNPVLPFNDGVYFASTEKSNIIRGWIFGTTLDSKTQSLLIVNNATNVVIKVCEFQFCNDPFLGVYYHKNNKSWMESEFRVYSSANNCTFEYVSQPFLMDLEGKQGNFKNLREFVFKNIDGYFKIYSKHTPINLVRDLPQGFSALEPLVDLPIGINITRFQTLLALHRSYLTPGDSSSGWTAGAAAYYVGYLQPRTFLLKYNENGTITDAVDCGNDTLSETKCTLGSGGGGESQVRQQFSKDIEKLLNEQVNKEMQSSNLYMSMSSWCYTHSLDGAGLFLFDHAAEEYEHAKKLIIFLNENNVPVQLTSISAPEHKFEGLTQIFQKAYEHEQHISESINNIVDHAIKSKDHATFNFLQWYVAEQHEEEVLFKDILDKIELIGNENHGLYLADQYVKGIAKSRKSGS

SEQ ID NO: 94 - protein, 491 aa, Artificial Sequence
  Description of Artificial Sequence: Synthetic polypeptide
HHHHHHHHGPLEVLFQGPSSQCVNLTTRTQLPPAYTNSFTRGVYYPDKVFRSSVLHSTQDLFLPFTSNVTWFHAIHVSGTNGTKRFDNPVLPFNDGVYFASTEKSNIIRGWIFGTTLDSKTQSLLIVNNATNVVIKVCEFQFCNDPFLGVYYHKNNKSWMESEFRVYSSANNCTFEYVSQPFLMDLEGKQGNFKNLREFVFKNIDGYFKIYSKHTPINLVRDLPQGFSALEPLVDLPIGINITRFQTLLALHRSYLTPGDSSSGWTAGAAAYYVGYLQPRTFLLKYNENGTITDAVDCALDPLSETKCTLGSGGGGESQVRQQFSKDIEKLLNEQVNKEMQSSNLYMSMSSWCYTHSLDGAGLFLFDHAAEEYEHAKKLIIFLNENNVPVQLTSISAPEHKFEGLTQIFQKAYEHEQHISESINNIVDHAIKSKDHATFNFLQWYVAEQHEEEVLFKDILDKIELIGNENHGLYLADQYVKGIAKSRKSGS

SEQ ID NO: 95 - protein, 491 aa, Artificial Sequence
  Description of Artificial Sequence: Synthetic polypeptide
HHHHHHHHGPLEVLFQGPSSQCVNLTTRTQLPPATTNSFTRGVYYPDKVFRSSVLHSTQDLFLPFFSNVTWFHAIHVSGTNGTKRFDNPVLPFNDGVYFASTEKSNIIRGWIFGTTLDSKTQSLLIVNNATNVVIKVCEFQFCNDPFLGVYYHKNNKSWMESEFRVYSSANNCTFEYVSQPFLMDLEGKQGNFKNLREFVFKNIDGYFKIYSKHTPINLVRDLPQGFSALEPLVDLPIGINITRFQTLLALHRSYLTPGDSSSGWTAGAAAYYVGYLQPRTFLLKYNENGTITDAVDCALDPLSETKCTLGSGGGGESQVRQQFSKDIEKLLNEQVNKEMQSSNLYMSMSSWCYTHSLDGAGLFLFDHAAEEYEHAKKLIIFLNENNVPVQLTSISAPEHKFEGLTQIFQKAYEHEQHISESINNIVDHAIKSKDHATFNFLQWYVAEQHEEEVLFKDILDKIELIGNENHGLYLADQYVKGIAKSRKSGS

SEQ ID NO: 96 - protein, 491 aa, Artificial Sequence
  Description of Artificial Sequence: Synthetic polypeptide
HHHHHHHHGPLEVLFQGPSSQCVNLTTRTQLPPAYTNSFTRGVYYPDKVFRSSVLHSTQDLFLPFFSNVTWFHAIHVSGTNGTKRFDNPVLPFNDGVYFASTEKSNIIRGWIFGTTLDSKTQSLLIVNNATNVVIKVCEFQFCNDPFLGVYYHKNNKSWMESEFRVYSSANNCTFEYVSQPFLMDLEGKQGNFKNLREFVFKNIDGAFKIYSKHTPINLVRDLPQGFSALEPLVDLPIGINITRFQTLLALHRSYLTPGDSSSGWTAGAAAYYVGYLQPRTFLLKYNENGTITDAVDCALDPLSETKCTLGSGGGGESQVRQQFSKDIEKLLNEQVNKEMQSSNLYMSMSSWCYTHSLDGAGLFLFDHAAEEYEHAKKLIIFLNENNVPVQLTSISAPEHKFEGLTQIFQKAYEHEQHISESINNIVDHAIKSKDHATFNFLQWYVAEQHEEEVLFKDILDKIELIGNENHGLYLADQYVKGIAKSRKSGS

SEQ ID NO: 97 - protein, 491 aa, Artificial Sequence
  Description of Artificial Sequence: Synthetic polypeptide
HHHHHHHHGPLEVLFQGPSSQCVNLTTRTQLPPAYTNSFTRGVYYPDKVFRSSVLHSTQDLFLPFFSNVTWFHAIHVSGTNGTKRFDNPVLPFNDGVYFASTEKSNIIRGWIFGTTLDSKTQSLLIVNNATNVVIKVCEFQFCNDPFLGVYYHKNNKSWMESEFRVYSSANNCTFEYVSQPFLMDLEGKQGNFKNLREFVFKNIDGNFTIYSKHTPINLVRDLPQGFSALEPLVDLPIGINITRFQTLLALHRSYLTPGDSSSGWTAGAAAYYVGYLQPRTFLLKYNENGTITDAVDCALDPLSETKCTLGSGGGGESQVRQQFSKDIEKLLNEQVNKEMQSSNLYMSMSSWCYTHSLDGAGLFLFDHAAEEYEHAKKLIIFLNENNVPVQLTSISAPEHKFEGLTQIFQKAYEHEQHISESINNIVDHAIKSKDHATFNFLQWYVAEQHEEEVLFKDILDKIELIGNENHGLYLADQYVKGIAKSRKSGS

SEQ ID NO: 98 - protein, 491 aa, Artificial Sequence
  Description of Artificial Sequence: Synthetic polypeptide
HHHHHHHHGPLEVLFQGPSSQCVNLTTRTQLPPAYTNSFTRGVYTPDKVFRSSVLHSTQDLFLPFFSNVTWFHAIHVSGTNGTKRFDNPVLPFNDGVYFASTEKSNIIRGWIFGTTLDSKTQSLLIVNNATNVVIKVCEFQFCNDPFLGVYYHKNNKSWMESEFRVYSSANNCTFEYVSQPFLMDLEGKQGNFKNLREFVFKNIDGYFKIYSKHTPINLVRDLPQGFSALEPLVDLPIGINITRFQTLLALHRSYLTPGDSSSGWTAGAAAYYVGYLQPRTFLLKYNENGTITDAVDCALDPLSETKCTLGSGGGGESQVRQQFSKDIEKLLNEQVNKEMQSSNLYMSMSSWCYTHSLDGAGLFLFDHAAEEYEHAKKLIIFLNENNVPVQLTSISAPEHKFEGLTQIFQKAYEHEQHISESINNIVDHAIKSKDHATFNFLQWYVAEQHEEEVLFKDILDKIELIGNENHGLYLADQYVKGIAKSRKSGS

SEQ ID NO: 99 - protein, 491 aa, Artificial Sequence
  Description of Artificial Sequence: Synthetic polypeptide
HHHHHHHHGPLEVLFQGPSSQCVNLTTRTQLPPAYTNSFTRGVYYPDKTARSSTLHSTQDLFLPFFSNVTWFHAIHVSGTNGTKRFDNPVLPFNDGVYFASTEKSNIIRGWIFGTTLDSKTQSLLIVNNATNVVIKVCEFQFCNDPFLGVYYHKNNKSWMESEFRVYSSANNCTFEYVSQPFLMDLEGKQGNFKNLREFVFKNIDGYFKIYSKHTPINLVRDLPQGFSALEPLVDLPIGINITRFQTLLALHRSYLTPGDSSSGWTAGAAAYYVGYLQPRTFLLKYNENGTITDAVDCALDPLSETKCTLGSGGGGESQVRQQFSKDIEKLLNEQVNKEMQSSNLYMSMSSWCYTHSLDGAGLFLFDHAAEEYEHAKKLIIFLNENNVPVQLTSISAPEHKFEGLTQIFQKAYEHEQHISESINNIVDHAIKSKDHATFNFLQWYVAEQHEEEVLFKDILDKIELIGNENHGLYLADQYVKGIAKSRKSGS

SEQ ID NO: 100 - protein, 491 aa, Artificial Sequence
  Description of Artificial Sequence: Synthetic polypeptide
HHHHHHHHGPLEVLFQGPSSQCVNLTTRTQLPPAYTNSFTRGVYYPDKVFRSSVLHSTQDLFLPFFSNVTWFHAIHVSGTNGTKRFDNPVLPFNDGVYFASTEKSNIIRGWIFGTTLDSKTQSLNITNNATNVVIKVCEFQFCNDPFLGVYYHKNNKSWMESEFRVYSSANNCTFEYVSQPFLMDLEGKQGNFKNLREFVFKNIDGYFKIYSKHTPINLVRDLPQGFSALEPLVDLPIGINITRFQTLLALHRSYLTPGDSSSGWTAGAAAYYVGYLQPRTFLLKYNENGTITDAVDCALDPLSETKCTLGSGGGGESQVRQQFSKDIEKLLNEQVNKEMQSSNLYMSMSSWCYTHSLDGAGLFLFDHAAEEYEHAKKLIIFLNENNVPVQLTSISAPEHKFEGLTQIFQKAYEHEQHISESINNIVDHAIKSKDHATFNFLQWYVAEQHEEEVLFKDILDKIELIGNENHGLYLADQYVKGIAKSRKSGS

SEQ ID NO: 101 - protein, 491 aa, Artificial Sequence
  Description of Artificial Sequence: Synthetic polypeptide
HHHHHHHHGPLEVLFQGPSSQCVNLTTRTQLPPAYTNSFTRGVYYPDKVFRSSVLHSTQDLFLPFFSNVTWFHAIHVSGTNGTKRFDNPVLPFNDGVYFASTEKSNIIRGWFFGTTLDSKTQSLLIVNNATNVVIKVCENQTCNDPFLGVYYHKNNKSWMESEFRVYSSANNCTFEYVSQPFLMDLEGKQGNFKNLREFVFKNIDGYFKIYSKHTPINLVRDLPQGFSALEPLVDLPIGINITRFQTLLALHRSYLTPGDSSSGWTAGAAAYYVGYLQPRTFLLKYNENGTITDAVDCALDPLSETKCTLGSGGGGESQVRQQFSKDIEKLLNEQVNKEMQSSNLYMSMSSWCYTHSLDGAGLFLFDHAAEEYEHAKKLIIFLNENNVPVQLTSISAPEHKFEGLTQIFQKAYEHEQHISESINNIVDHAIKSKDHATFNFLQWYVAEQHEEEVLFKDILDKIELIGNENHGLYLADQYVKGIAKSRKSGS

SEQ ID NO: 102 - protein, 491 aa, Artificial Sequence
  Description of Artificial Sequence: Synthetic polypeptide
HHHHHHHHGPLEVLFQGPSSQCVNLTTRTQLPPAYTNSFTRGVYYPDKVFRSSVLHSTQDLFLPFFSNVTWFHAIHVSGTNGTKRFDNPVLPFNDGVYFASTEKSNIIRGWIFGTTLDSKTQSLLIVNNATNNVTKVCEFQFCNDPFLGVYYHKNNKSWMESEFRVYSSANNCTFEYVSQPFLMDLEGKQGNFKNLREFVFKNIDGYFKIYSKHTPINLVRDLPQGFSALEPLVDLPIGINITRFQTLLALHRSYLTPGDSSSGWTAGAAAYYVGYLQPRTFLLKYNENGTITDAVDCALDPLSETKCTLGSGGGGESQVRQQFSKDIEKLLNEQVNKEMQSSNLYMSMSSWCYTHSLDGAGLFLFDHAAEEYEHAKKLIIFLNENNVPVQLTSISAPEHKFEGLTQIFQKAYEHEQHISESINNIVDHAIKSKDHATFNFLQWYVAEQHEEEVLFKDILDKIELIGNENHGLYLADQYVKGIAKSRKSGS

SEQ ID NO: 103 - protein, 491 aa, Artificial Sequence
  Description of Artificial Sequence: Synthetic polypeptide
HHHHHHHHGPLEVLFQGPSSQCVNLTTRTQLPPAYTNSFTRGVYYPDKVFRSSVLHSTQDLFLPFFSNVTWFHAIHVSGTNGTKRFDNPVLPFNDGVYFASTEKSNIIRGWIFGTTLDSKTQSLLIVNNATNVVIKVCEFQFCNDPFLGVYYHKNNKSWMESEFRVYSSANNCTFEYVSQPFLMDLEGKQGNFKNLREFVFKNIDGYFKIYSKHTPINLVRDLPQGFSALEPNVTLPIGINITRFQTLLALHRSYLTPGDSSSGWTAGAAAYYVGYLQPRTFLLKYNENGTITDAVDCALDPLSETKCTLGSGGGGESQVRQQFSKDIEKLLNEQVNKEMQSSNLYMSMSSWCYTHSLDGAGLFLFDHAAEEYEHAKKLIIFLNENNVPVQLTSISAPEHKFEGLTQIFQKAYEHEQHISESINNIVDHAIKSKDHATFNFLQWYVAEQHEEEVLFKDILDKIELIGNENHGLYLADQYVKGIAKSRKSGS

SEQ ID NO: 104 - protein, 491 aa, Artificial Sequence
  Description of Artificial Sequence: Synthetic polypeptide
HHHHHHHHGPLEVLFQGPSSQCVNLTTRTQLPPAYTNSFTRGVYYPDKVFRSSVLHSTQDLFLPFFSNVTWFHAIHVSGTNGTKRFDNPVLPFNDGVYFASTEKSNIIRGWIFGTTLDSKTQSLLIVNNATNVVIKVCEFQFCNDPFLGVYYHKNNKSWMESEFRVYSSANNCTFEYVSQPFLMDLEGKQGNFKNLREFVFKNIDGYFKIYSKHTPINLVRDLPQGFSALEPLNDTPIGINITRFQTLLALHRSYLTPGDSSSGWTAGAAAYYVGYLQPRTFLLKYNENGTITDAVDCALDPLSETKCTLGSGGGGESQVRQQFSKDIEKLLNEQVNKEMQSSNLYMSMSSWCYTHSLDGAGLFLFDHAAEEYEHAKKLIIFLNENNVPVQLTSISAPEHKFEGLTQIFQKAYEHEQHISESINNIVDHAIKSKDHATFNFLQWYVAEQHEEEVLFKDILDKIELIGNENHGLYLADQYVKGIAKSRKSGS

SEQ ID NO: 105 - protein, 825 aa, Artificial Sequence
  Description of Artificial Sequence: Synthetic polypeptide
SSQCVNLTTRTQLPPAYTNSFTRGVYYPDKVFRSSVLHSTQDLFLPFFSNVTWFHAIHVSGTNGTKRFDNPVLPFNDGVYFASTEKSNIIRGWIFGTTLDSKTQSLLIVNNATNVVIKVCEFQFCNDPFLGVYYHKNNKSWMESEFRVYSSANNCTFEYVSQPFLMDLEGKQGNFKNLREFVFKNIDGYFKIYSKHTPINLVRDLPQGFSALEPLVDLPIGINITRFQTLLALHRSYLTPGDSSSGWTAGAAAYYVGYLQPRTFLLKYNENGTITDAVDCALDPLSETKCTLKSFTVEKGIYQTSNFRVQPTESIVRFPNITNLCPFGEVFNATRFASVYAWNRKRISNCVADYSVLYNSASFSTFKCYGVSPTKLNDLCFTNVYADSFVIRGDEVRQIAPGQTGKIADYNYKLPDDFTGCVIAWNSNNLDSKVGGNYNYLYRLFRKSNLKPFERDISTEIYQAGSTPCNGVEGFNCYFPLQSYGFQPTNGVGYQPYRVVVLSFELLHAPATVCGPKKSTNLVKNKCVNFNFNGLTGTGVLTESNKKFLPFQQFGRDIADTTDAVRDPQTLEILDITPCSFGGVSVITPGTNTSNQVAVLYQDVNCTEVPVAIHADQLTPTWRVYSTGSNVFQTRAGCLIGAEHGSGGGGESQVRQQFSKDIEKLLNEQVNKEMQSSNLYMSMSSWCYTHSLDGAGLFLFDHAAEEYEHAKKLIIFLNENNVPVQLTSISAPEHKFEGLTQIFQKAYEHEQHISESINNIVDHAIKSKDHATFNFLQWYVAEQHEEEVLFKDILDKIELIGNENHGLYLADQYVKGIAKSRKSGS

SEQ ID NO: 106 - protein, 825 aa, Artificial Sequence
  Description of Artificial Sequence: Synthetic polypeptide
SSQCVNLTTRTQLPPAYTNSFTRGVYYPDKVFRSSVLHSTQDLFLPFFSNVTWFHAIHVSGTNGTKRFDNPVLPFNDGVYFASTEKSNIIRGWIFGTTLDSKTQSLLIVNNATNVVIKVCEFQFCNDPFLGVYYHKNNKSWMESEFRVYSSANNCTFEYVSQPFLMDLEGKQGNFKNLREFVFKNIDGYFKIYSKHTPINLVRDLPQGFSALEPLVDLPIGINITRFQTLLALHRSYLTPGDSSSGWTAGAAAYYVGYLQPRTFLLKYNENGTITDAVDCALDPLSETKCTLKSFTVEKGIYQTSNFRVQPTESIVRFPNITNLCPFGEVFNATRFASVYAWNRKRISNCVADYSVLYNSASFSTFKCYGVSPTKLNDLCFTNVYADSFVIRGDEVRQIAPGQTGKIADYNYKLPDDFTGCVIAWNSNNLDSKVGGNYNYLYRLFRKSNLKPFERDISTEIYQAGSTPCNGVEGFNCYFPLQSYGFQPTNGVGYQPYRVVVLSFELLHAPATVCGPKKSTNLVKNKCVNFNFNGLTGTGVLTESNKKFLPFQQFGRDIADTTDAVRDPQTLEILDITPCSFGGVSVITPGTNTSNQVAVNYTDVNCTEVPVAIHADQLTPTWRVYSTGSNVFQTRAGCLIGAEHGSGGGGESQVRQQFSKDIEKLLNEQVNKEMQSSNLYMSMSSWCYTHSLDGAGLFLFDHAAEEYEHAKKLIIFLNENNVPVQLTSISAPEHKFEGLTQIFQKAYEHEQHISESINNIVDHAIKSKDHATFNFLQWYVAEQHEEEVLFKDILDKIELIGNENHGLYLADQYVKGIAKSRKSGS

SEQ ID NO: 107 - protein, 866 aa, Artificial Sequence
  Description of Artificial Sequence: Synthetic polypeptide
SSQCVNLTTRTQLPPAYTNSFTRGVYYPDKVFRSSVLHSTQDLFLPFFSNVTWFHAIHVSGTNGTKRFDNPVLPFNDGVYFASTEKSNIIRGWIFGTTLDSKTQSLLIVNNATNVVIKVCEFQFCNDPFLGVYYHKNNKSWMESEFRVYSSANNCTFEYVSQPFLMDLEGKQGNFKNLREFVFKNIDGYFKIYSKHTPINLVRDLPQGFSALEPLVDLPIGINITRFQTLLALHRSYLTPGDSSSGWTAGAAAYYVGYLQPRTFLLKYNENGTITDAVDCALDPLSETKCTLKSFTVEKGIYQTSNFRVQPTESIVRFPNITNLCPFGEVFNATRFASVYAWNRKRISNCVADYSVLYNSASFSTFKCYGVSPTKLNDLCFTNVYADSFVIRGDEVRQIAPGQTGKIADYNYKLPDDFTGCVIAWNSNNLDSKVGGNYNYLYRLFRKSNLKPFERDISTEIYQAGSTPCNGVEGFNCYFPLQSYGFQPTNGVGYQPYRVVVLSFELLHAPATVCGPKKSTNLVKNKCVNFNFNGLTGTGVLTESNKKFLPFQQFGRDIADTTDAVRDPQTLEILDITPCSFGGVSVITPGTNTSNQVAVLYQDVNCTEVPVAIHADQLTPTWRVYSTGSNVFQTRAGCLIGAEHVNNSYECDIPIGAGICASYQTQTNSPGSASSVASQSIIAYTGSGGGGESQVRQQFSKDIEKLLNEQVNKEMQSSNLYMSMSSWCYTHSLDGAGLFLFDHAAEEYEHAKKLIIFLNENNVPVQLTSISAPEHKFEGLTQIFQKAYEHEQHISESINNIVDHAIKSKDHATFNFLQWYVAEQHEEEVLFKDILDKIELIGNENHGLYLADQYVKGIAKSRKSGS

SEQ ID NO: 108 - protein, 855 aa, Artificial Sequence
  Description of Artificial Sequence: Synthetic polypeptide
SSQCVNLTTRTQLPPAYTNSFTRGVYYPDKVFRSSVLHSTQDLFLPFFSNVTWFHAIHVSGTNGTKRFDNPVLPFNDGVYFASTEKSNIIRGWIFGTTLDSKTQSLLIVNNATNVVIKVCEFQFCNDPFLGVYYHKNNKSWMESEFRVYSSANNCTFEYVSQPFLMDLEGKQGNFKNLREFVFKNIDGYFKIYSKHTPINLVRDLPQGFSALEPLVDLPIGINITRFQTLLALHRSYLTPGDSSSGWTAGAAAYYVGYLQPRTFLLKYNENGTITDAVDCALDPLSETKCTLKSFTVEKGIYQTSNFRVQPTESIVRFPNITNLCPFGEVFNATRFASVYAWNRKRISNCVADYSVLYNSASFSTFKCYGVSPTKLNDLCFTNVYADSFVIRGDEVRQIAPGQTGKIADYNYKLPDDFTGCVIAWNSNNLDSKVGGNYNYLYRLFRKSNLKPFERDISTEIYQAGSTPCNGVEGFNCYFPLQSYGFQPTNGVGYQPYRVVVLSFELLHAPATVCGPKKSTNLVKNKCVNFNFNGLTGTGVLTESNKKFLPFQQFGRDIADTTDAVRDPQTLEILDITPCSFGGVSVITPGTNTSNQVAVLYQDVNCTEVPVAIHADQLTPTWRVYSTGSNVFQTRAGCLIGAEHVNNSYECDIPIGAGICASYQTGSQSIIAYTGSGGGGESQVRQQFSKDIEKLLNEQVNKEMQSSNLYMSMSSWCYTHSLDGAGLFLFDHAAEEYEHAKKLIIFLNENNVPVQLTSISAPEHKFEGLTQIFQKAYEHEQHISESINNIVDHAIKSKDHATFNFLQWYVAEQHEEEVLFKDILDKIELIGNENHGLYLADQYVKGIAKSRKSGS

SEQ ID NO: 109 - protein, 856 aa, Artificial Sequence
  Description of Artificial Sequence: Synthetic polypeptide
SSQCVNLTTRTQLPPAYTNSFTRGVYYPDKVFRSSVLHSTQDLFLPFFSNVTWFHAIHVSGTNGTKRFDNPVLPFNDGVYFASTEKSNIIRGWIFGTTLDSKTQSLLIVNNATNVVIKVCEFQFCNDPFLGVYYHKNNKSWMESEFRVYSSANNCTFEYVSQPFLMDLEGKQGNFKNLREFVFKNIDGYFKIYSKHTPINLVRDLPQGFSALEPLVDLPIGINITRFQTLLALHRSYLTPGDSSSGWTAGAAAYYVGYLQPRTFLLKYNENGTITDAVDCALDPLSETKCTLKSFTVEKGIYQTSNFRVQPTESIVRFPNITNLCPFGEVFNATRFASVYAWNRKRISNCVADYSVLYNSASFSTFKCYGVSPTKLNDLCFTNVYADSFVIRGDEVRQIAPGQTGKIADYNYKLPDDFTGCVIAWNSNNLDSKVGGNYNYLYRLFRKSNLKPFERDISTEIYQAGSTPCNGVEGFNCYFPLQSYGFQPTNGVGYQPYRVVVLSFELLHAPATVCGPKKSTNLVKNKCVNFNFNGLTGTGVLTESNKKFLPFQQFGRDIADTTDAVRDPQTLEILDITPCSFGGVSVITPGTNTSNQVAVLYQDVNCTEVPVAIHADQLTPTWRVYSTGSNVFQTRAGCLIGAEHVNNSYECDIPIGAGICASYQTGGSQSIIAYTGSGGGGESQVRQQFSKDIEKLLNEQVNKEMQSSNLYMSMSSWCYTHSLDGAGLFLFDHAAEEYEHAKKLIIFLNENNVPVQLTSISAPEHKFEGLTQIFQKAYEHEQHISESINNIVDHAIKSKDHATFNFLQWYVAEQHEEEVLFKDILDKIELIGNENHGLYLADQYVKGIAKSRKSGS

SEQ ID NO: 110 - protein, 856 aa, Artificial Sequence
  Description of Artificial Sequence: Synthetic polypeptide
SSQCVNLTTRTQLPPAYTNSFTRGVYYPDKVFRSSVLHSTQDLFLPFFSNVTWFHAIHVSGTNGTKRFDNPVLPFNDGVYFASTEKSNIIRGWIFGTTLDSKTQSLLIVNNATNVVIKVCEFQFCNDPFLGVYYHKNNKSWMESEFRVYSSANNCTFEYVSQPFLMDLEGKQGNFKNLREFVFKNIDGYFKIYSKHTPINLVRDLPQGFSALEPLVDLPIGINITRFQTLLALHRSYLTPGDSSSGWTAGAAAYYVGYLQPRTFLLKYNENGTITDAVDCALDPLSETKCTLKSFTVEKGIYQTSNFRVQPTESIVRFPNITNLCPFGEVFNATRFASVYAWNRKRISNCVADYSVLYNSASFSTFKCYGVSPTKLNDLCFTNVYADSFVIRGDEVRQIAPGQTGKIADYNYKLPDDFTGCVIAWNSNNLDSKVGGNYNYLYRLFRKSNLKPFERDISTEIYQAGSTPCNGVEGFNCYFPLQSYGFQPTNGVGYQPYRVVVLSFELLHAPATVCGPKKSTNLVKNKCVNFNFNGLTGTGVLTESNKKFLPFQQFGRDIADTTDAVRDPQTLEILDITPCSFGGVSVITPGTNTSNQVAVLYQDVNCTEVPVAIHADQLTPTWRVYSTGSNVFQTRAGCLIGAEHVNNSYECDIPIGAGICASYQTPGSQSIIAYTGSGGGGESQVRQQFSKDIEKLLNEQVNKEMQSSNLYMSMSSWCYTHSLDGAGLFLFDHAAEEYEHAKKLIIFLNENNVPVQLTSISAPEHKFEGLTQIFQKAYEHEQHISESINNIVDHAIKSKDHATFNFLQWYVAEQHEEEVLFKDILDKIELIGNENHGLYLADQYVKGIAKSRKSGS

SEQ ID NO: 111 - protein, 848 aa, Artificial Sequence
  Description of Artificial Sequence: Synthetic polypeptide
SSQCVNLTTRTQLPPAYTNSFTRGVYYPDKVFRSSVLHSTQDLFLPFFSNVTWFHAIHVSGTNGTKRFDNPVLPFNDGVYFASTEKSNIIRGWIFGTTLDSKTQSLLIVNNATNVVIKVCEFQFCNDPFLGVYYHKNNKSWMESEFRVYSSANNCTFEYVSQPFLMDLEGKQGNFKNLREFVFKNIDGYFKIYSKHTPINLVRDLPQGFSALEPLVDLPIGINITRFQTLLALHRSYLTPGDSSSGWTAGAAAYYVGYLQPRTFLLKYNENGTITDAVDCALDPLSETKCTLKSFTVEKGNYTTSNFRVQPTESIVRFPNITNLCPFGEVFNATRFASVYAWNRKRISNCVADYSVLYNSASFSTFKCYGVSPTKLNDLCFTNVYADSFVIRGDEVRQIAPGQTGKIADYNYKLPDDFTGCVIAWNSNNLDSKVGGNYNYLYRLFRKSNLKPFERDISTEIYQAGSTPCNGVEGFNCYFPLQSYGFQPTNGVGYQPYRVVVLSFELLHAPATVCGPKKSTNLVKNKCVNFNFNGLTGTGVLTESNKKFLPFQQFGRDIADTTDAVRDPQTLEILDITPCSFGGVSVITPGTNTSNQVAVLYQDVNCTEVPVAIHADQLTPTWRVYSTGSNVFQTRAGCLIGAEHVNNSYECDIPIGAGICASYQTQTGSGGGGESQVRQQFSKDIEKLLNEQVNKEMQSSNLYMSMSSWCYTHSLDGAGLFLFDHAAEEYEHAKKLIIFLNENNVPVQLTSISAPEHKFEGLTQIFQKAYEHEQHISESINNIVDHAIKSKDHATFNFLQWYVAEQHEEEVLFKDILDKIELIGNENHGLYLADQYVKGIAKSRKSGS

SEQ ID NO: 112 - protein, 848 aa, Artificial Sequence
  Description of Artificial Sequence: Synthetic polypeptide
SSQCVNLTTRTQLPPAYTNSFTRGVYYPDKVFRSSVLHSTQDLFLPFFSNVTWFHAIHVSGTNGTKRFDNPVLPFNDGVYFASTEKSNIIRGWIFGTTLDSKTQSLLIVNNATNVVIKVCEFQFCNDPFLGVYYHKNNKSWMESEFRVYSSANNCTFEYVSQPFLMDLEGKQGNFKNLREFVFKNIDGYFKIYSKHTPINLVRDLPQGFSALEPLVDLPIGINITRFQTLLALHRSYLTPGDSSSGWTAGAAAYYVGYLQPRTFLLKYNENGTITDAVDCALDPLSETKCTLKSFTVEKGIYQTSNFRVQPTESIVRFPNITNLCPFGEVFNATRFASVYAWNRKRISNCVADYSVLYNSASFSTFKCYGVSPTKLNDLCFTNVYADSFVIRGDEVRQIAPGQTGKIADYNYKLPDDFTGCVIAWNSNNLDSKVGGNYNYLYRLFRKSNLKPFERDISTEIYQAGSTPCNGVEGFNCYFPLQSYGFQPTNGVGYQPYRVVVLSFELLHAPATVCGPKKSTNLVKNKCVNFNFNGLTGTGVLTESNKKFLPFQQFGRDIADTTDAVRDPQTLEILDITPCSFGGVSVITPGTNTSNQVAVLYQDVNCTEVPVAIHADQLTPTWRVYSTGSNVFQTRAGCLNGSEHVNNSYECDIPIGAGICASYQTQTGSGGGGESQVRQQFSKDIEKLLNEQVNKEMQSSNLYMSMSSWCYTHSLDGAGLFLFDHAAEEYEHAKKLIIFLNENNVPVQLTSISAPEHKFEGLTQIFQKAYEHEQHISESINNIVDHAIKSKDHATFNFLQWYVAEQHEEEVLFKDILDKIELIGNENHGLYLADQYVKGIAKSRKSGS

SEQ ID NO: 113 - protein, 848 aa, Artificial Sequence
  Description of Artificial Sequence: Synthetic polypeptide
SSQCVNLTTRTQLPPAYTNSFTRGVYYPDKVFRSSVLHSTQDLFLPFFSNVTWFHAIHVSGTNGTKRFDNPVLPFNDGVYFASTEKSNIIRGWIFGTTLDSKTQSLLIVNNATNVVIKVCEFQFCNDPFLGVYYHKNNKSWMESEFRVYSSANNCTFEYVSQPFLMDLEGKQGNFKNLREFVFKNIDGYFKIYSKHTPINLVRDLPQGFSALEPLVDLPIGINITRFQTLLALHRSYLTPGDSSSGWTAGAAAYYVGYLQPRTFLLKYNENGTITDAVDCALDPLSETKCTLKSFTVEKGIYQTCNFRVQPTESIVRFPNITNLCPFGEVFNATRFASVYAWNRKRISNCVADYSVLYNSASFSTFKCYGVSPTKLNDLCFTNVYADSFVIRGDEVRQIAPGQTGKIADYNYKLPDDFTGCVIAWNSNNLDSKVGGNYNYLYRLFRKSNLKPFERDISTEIYQAGSTPCNGVEGFNCYFPLQSYGFQPTNGVGYQPYRVVVLSFELLHAPATVCGPKKSTNLVKNKCVNFNFNGLTGTGVLTESNKKFLPFQQFGRDIADTTDAVRDPQTLEILDITPCSFGGCSVITPGTNTSNQVAVLYQDVNCTEVPVAIHADQLTPTWRVYSTGSNVFQTRAGCLIGAEHVNNSYECDIPIGAGICASYQTQTGSGGGGESQVRQQFSKDIEKLLNEQVNKEMQSSNLYMSMSSWCYTHSLDGAGLFLFDHAAEEYEHAKKLIIFLNENNVPVQLTSISAPEHKFEGLTQIFQKAYEHEQHISESINNIVDHAIKSKDHATFNFLQWYVAEQHEEEVLFKDILDKIELIGNENHGLYLADQYVKGIAKSRKSGS

SEQ ID NO: 114 - protein, 848 aa, Artificial Sequence
  Description of Artificial Sequence: Synthetic polypeptide
SSQCVNLTTRTQLPPAYTNSFTRGVYYPDKVFRSSVLHSTQDLFLPFFSNVTWFHAIHVSGTNGTKRFDNPVLPFNDGVYFASTEKSNIIRGWIFGTTLDSKTQSLLIVNNATNVVIKVCEFQFCNDPFLGVYYHKNNKSWMESEFRVYSSANNCTFEYVSQPFLMDLEGKQGNFKNLREFVFKNIDGYFKIYSKHTPINLVRDLPQGFSALEPLVDLPIGINITRFQTLLALHRSYLTPGDSSSGWTAGAAAYYVGYLQPRTFLLKYNENGTITDAVDCALDPLSETKCTLKSFTVEKGIYQTSNFRCQPTESIVRFPNITNLCPFGEVFNATRFASVYAWNRKRISNCVADYSVLYNSASFSTFKCYGVSPTKLNDLCFTNVYADSFVIRGDEVRQIAPGQTGKIADYNYKLPDDFTGCVIAWNSNNLDSKVGGNYNYLYRLFRKSNLKPFERDISTEIYQAGSTPCNGVEGFNCYFPLQSYGFQPTNGVGYQPYRVVVLSFELLHAPATVCGPKKSTNLVKNKCVNFNFNGLTGTGVLTESNKKFLPFQQFGRDIADTTDAVRDPQTLEILDITPCCFGGVSVITPGTNTSNQVAVLYQDVNCTEVPVAIHADQLTPTWRVYSTGSNVFQTRAGCLIGAEHVNNSYECDIPIGAGICASYQTQTGSGGGGESQVRQQFSKDIEKLLNEQVNKEMQSSNLYMSMSSWCYTHSLDGAGLFLFDHAAEEYEHAKKLIIFLNENNVPVQLTSISAPEHKFEGLTQIFQKAYEHEQHISESINNIVDHAIKSKDHATFNFLQWYVAEQHEEEVLFKDILDKIELIGNENHGLYLADQYVKGIAKSRKSGS

SEQ ID NO: 115 - protein, 848 aa, Artificial Sequence
  Description of Artificial Sequence: Synthetic polypeptide
SSQCVNLTTRTQLPPAYTNSFTRGVYYPDKVFRSSVLHSTQDLFLPFFSNVTWFHAIHVSGTNGTKRFDNPVLPFNDGVYFASTEKSNIIRGWIFGTTLDSKTQSLLIVNNATNVVIKVCEFQFCNDPFLGVYYHKNNKSWMESEFRVYSSANNCTFEYVSQPFLMDLEGKQGNFKNLREFVFKNIDGYFKIYSKHTPINLVRDLPQGFSALEPLVDLPIGINITRFQTLLALHRSYLTPGDSSSGWTAGAAAYYVGYLQPRTFLLKYNENGTITDAVDCALDPLSETKCTLKSFTVEKGIYQTSNFRVQPTESIVRFPNITNLCPFGEVFNATRFASVYAWNRKRISNCVADYSVLYNSASFSTFKCYGVSPTKLNDLCFTNVYADSFVIRGDEVRQIAPGQTGKIADYNYKLPDDFTGCVIAWNSNNLDSKVGGNYNYLYRLFRKSNLKPFERDISTEIYQAGSTPCNGVEGFNCYFPLQSYGFQPTNGVGYQPYRVVVLSFELLHAPATVCGPKKSTNLVKNKCVNFNFNGLTGTGVLTESNKKFQPHQQFGRDIADTTDAVRDPQTLEILDITPCSFGGVSVITPGTNTSNQVAVLYQDVNCTEVPVAIHADQLTPTWRVYSTGSNVFQTRAGCLIGAEHVNNSYECDIPIGAGICASYQTQTGSGGGGESQVRQQFSKDIEKLLNEQVNKEMQSSNLYMSMSSWCYTHSLDGAGLFLFDHAAEEYEHAKKLIIFLNENNVPVQLTSISAPEHKFEGLTQIFQKAYEHEQHISESINNIVDHAIKSKDHATFNFLQWYVAEQHEEEVLFKDILDKIELIGNENHGLYLADQYVKGIAKSRKSGS

SEQ ID NO: 116 - protein, 848 aa, Artificial Sequence
  Description of Artificial Sequence: Synthetic polypeptide
SSQCVNLTTRTQLPPAYTNSFTRGVYYPDKVFRSSVLHSTQDLFLPFFSNVTWFHAIHVSGTNGTKRFDNPVLPFNDGVYFASTEKSNIIRGWIFGTTLDSKTQSLLIVNNATNVVIKVCEFQFCNDPFLGVYYHKNNKSWMESEFRVYSSANNCTFEYVSQPFLMDLEGKQGNFKNLREFVFKNIDGYFKIYSKHTPINLVRDLPQGFSALEPLVDLPIGINITRFQTLLALHRSYLTPGDSSSGWTAGAAAYYVGYLQPRTFLLKYNENGTITDAVDCALDPLSETKCTLKSFTVEKGIYQTSNFRVQPTESIVRFPNITNLCPFGEVFNATRFASVYAWNRKRISNCVADYSVLYNSASFSTFKCYGVSPTKLNDLCFTNVYADSFVIRGDEVRQIAPGQTGKIADYNYKLPDDFTGCVIAWNSNNLDSKVGGNYNYLYRLFRKSNLKPFERDISTEIYQAGSTPCNGVEGFNCYFPLQSYGFQPTNGVGYQPYRVVVLSFELLHAPATVCGPKKSTNLVKNKCVNFNFNGLTGTGVLTESNKKFLPNQTFGRDIADTTDAVRDPQTLEILDITPCSFGGVSVITPGTNTSNQVAVLYQDVNCTEVPVAIHADQLTPTWRVYSTGSNVFQTRAGCLIGAEHVNNSYECDIPIGAGICASYQTQTGSGGGGESQVRQQFSKDIEKLLNEQVNKEMQSSNLYMSMSSWCYTHSLDGAGLFLFDHAAEEYEHAKKLIIFLNENNVPVQLTSISAPEHKFEGLTQIFQKAYEHEQHISESINNIVDHAIKSKDHATFNFLQWYVAEQHEEEVLFKDILDKIELIGNENHGLYLADQYVKGIAKSRKSGS

SEQ ID NO: 117 - protein, 848 aa, Artificial Sequence
  Description of Artificial Sequence: Synthetic polypeptide
SSQCVNLTTRTQLPPAYTNSFTRGVYYPDKVFRSSVLHSTQDLFLPFFSNVTWFHAIHVSGTNGTKRFDNPVLPFNDGVYFASTEKSNIIRGWIFGTTLDSKTQSLLIVNNATNVVIKVCEFQFCNDPFLGVYYHKNNKSWMESEFRVYSSANNCTFEYVSQPFLMDLEGKQGNFKNLREFVFKNIDGYFKIYSKHTPINLVRDLPQGFSALEPLVDLPIGINITRFQTLLALHRSYLTPGDSSSGWTAGAAAYYVGYLQPRTFLLKYNENGTITDAVDCALDPLSETKCTLKSFTVEKGIYQTSNFRVQPTESIVRFPNITNLCPFGEVFNATRFASVYAWNRKRISNCVADYSVLYNSASFSTFKCYGVSPTKLNDLCFTNVYADSFVIRGDEVRQIAPGQTGKIADYNYKLPDDFTGCVIAWNSNNLDSKVGGNYNYLYRLFRKSNLKPFERDISTEIYQAGSTPCNGVEGFNCYRPLQSYGFQPTNGVGYQPYRVVVLSFELLHAPATVCGPKKSTNLVKNKCVNFNFNGLTGTGVLTESNKKFLPFQQFGRDIADTTDAVRDPQTLEILDITPCSFGGVSVITPGTNTSNQVAVLYQDVNCTEVPVAIHADQLTPTWRVYSTGSNVFQTRAGCLIGAEHVNNSYECDIPIGAGICASYQTQTGSGGGGESQVRQQFSKDIEKLLNEQVNKEMQSSNLYMSMSSWCYTHSLDGAGLFLFDHAAEEYEHAKKLIIFLNENNVPVQLTSISAPEHKFEGLTQIFQKAYEHEQHISESINNIVDHAIKSKDHATFNFLQWYVAEQHEEEVLFKDILDKIELIGNENHGLYLADQYVKGIAKSRKSGS

SEQ ID NO: 118 - protein, 848 aa, Artificial Sequence
  Description of Artificial Sequence: Synthetic polypeptide
SSQCVNLTTRTQLPPAYTNSFTRGVYYPDKVFRSSVLHSTQDLFLPFFSNVTWFHAIHVSGTNGTKRFDNPVLPFNDGVYFASTEKSNIIRGWIFGTTLDSKTQSLLIVNNATNVVIKVCEFQFCNDPFLGVYYHKNNKSWMESEFRVYSSANNCTFEYVSQPFLMDLEGKQGNFKNLREFVFKNIDGYFKIYSKHTPINLVRDLPQGFSALEPLVDLPIGINITRFQTLLALHRSYLTPGDSSSGWTAGAAAYYVGYLQPRTFLLKYNENGTITDAVDCALDPLSETKCTLKSFTVEKGIYQTSNFRVQPTESIVRFPNITNLCPFGEVFNATRFASVYAWNRKRISNCVADYSVLYNSASFSTFKCYGVSPTKLNDLCFTNVYADSFVIRGDEVRQIAPGQTGKIADYNYKLPDDFTGCVIAWNSNNLDSKVGGNYNYLYRLFRKSNLKPFERDISTEIYQAGSTPCNGVEGFNCYAPLQSYGFQPTNGVGYQPYRVVVLSFELLHAPATVCGPKKSTNLVKNKCVNFNFNGLTGTGVLTESNKKFLPFQQFGRDIADTTDAVRDPQTLEILDITPCSFGGVSVITPGTNTSNQVAVLYQDVNCTEVPVAIHADQLTPTWRVYSTGSNVFQTRAGCLIGAEHVNNSYECDIPIGAGICASYQTQTGSGGGGESQVRQQFSKDIEKLLNEQVNKEMQSSNLYMSMSSWCYTHSLDGAGLFLFDHAAEEYEHAKKLIIFLNENNVPVQLTSISAPEHKFEGLTQIFQKAYEHEQHISESINNIVDHAIKSKDHATFNFLQWYVAEQHEEEVLFKDILDKIELIGNENHGLYLADQYVKGIAKSRKSGS

SEQ ID NO: 119 - protein, 1314 aa, Artificial Sequence
  Description of Artificial Sequence: Synthetic polypeptide
SSQCVNLTTRTQLPPAYTNSFTRGVYYPDKVFRSSVLHSTQDLFLPFFSNVTWFHAIHVSGTNGTKRFDNPVLPFNDGVYFASTEKSNIIRGWIFGTTLDSKTQSLLIVNNATNVVIKVCEFQFCNDPFLGVYYHKNNKSWMESEFRVYSSANNCTFEYVSQPFLMDLEGKQGNFKNLREFVFKNIDGYFKIYSKHTPINLVRDLPQGFSALEPLVDLPIGINITRFQTLLALHRSYLTPGDSSSGWTAGAAAYYVGYLQPRTFLLKYNENGTITDAVDCALDPLSETKCTLKSFTVEKGIYQTSNFRVQPTESIVRFPNITNLCPFGEVFNATRFASVYAWNRKRISNCVADYSVLYNSASFSTFKCYGVSPTKLNDLCFTNVYADSFVIRGDEVRQIAPGQTGKIADYNYKLPDDFTGCVIAWNSNNLDSKVGGNYNYLYRLFRKSNLKPFERDISTEIYQAGSTPCNGVEGFNCYFPLQSYGFQPTNGVGYQPYRVVVLSFELLHAPATVCGPKKSTNLVKNKCVNFNFNGLTGTGVLTESNKKFLPFQQFGRDIADTTDAVRDPQTLEILDITPCSFGGVSVITPGTNTSNQVAVLYQDVNCTEVPVAIHADQLTPTWRVYSTGSNVFQTRAGCLIGAEHVNNSYECDIPIGAGICASYQTQTNSPGSASSVASQSIIAYTMSLGAENSVAYSNNSIAIPTNFTISVTTEILPVSMTKTSVDCTMYICGDSTECSNLLLQYGSFCTQLNRALTGIAVEQDKNTQEVFAQVKQIYKTPPIKDFGGFNFSQILPDPSKPSKRSFIEDLLFNKVTLADAGFIKQYGDCLGDIAARDLICAQKFNGLTVLPPLLTDEMIAQYTSALLAGTITSGWTFGAGAALQIPFAMQMAYRFNGIGVTQNVLYENQKLIANQFNSAIGKIQDSLSSTASALGKLQDVVNQNAQALNTLVKQLSSNFGAISSVLNDILSRLDKVEAEVQIDRLITGRLQSLQTYVTQQLIRAAEIRASANLAATKMSECVLGQSKRVDFCGKGYHLMSFPQSAPHGVVFLHVTYVPAQEKNFTTAPAICHDGKAHFPREGVFVSNGTHWFVTQRNFYEPQIITTDNTFVSGNCDVVIGIVNNTVYDPLQPELDSFKEELDKGSGGSGDIIKLLNEQVNKEMQSSNLYMSMSSWCYTHSLDGAGLFLFDHAAEEYEHAKKLIIFLNENNVPVQLTSISAPEHKFEGLTQIFQKAYEHEQHISESINNIVDHAIKSKDHATFNFLQWYVAEQHEEEVLFKDILDKIELIGNENHGLYLADQYVKGIAKSRKSGS

SEQ ID NO: 120 - protein, 694 aa, Artificial Sequence
  Description of Artificial Sequence: Synthetic polypeptide
HHHHHHHHGPLEVLFQGPNITNLCPFGEVFNATRFASVYAWNRKRISNCVADYSVLYNSASFSTFKCYGVSPTKLNDLCFTNVYADSFVIRGDEVRQIAPGQTGKIADYNYKLPDDFTGCVIAWNSNNLDSKVGGNYNYLYRLFRKSNLKPFERDISTEIYQAGSTPCNGVEGFNCYFPLQSYGFQPTNGVGYQPYRVVVLSFELLHAPATVCGPGSGGSGSSQCVNLTTRTQLPPAYTNSFTRGVYYPDKVFRSSVLHSTQDLFLPFFSNVTWFHAIHVSGTNGTKRFDNPVLPFNDGVYFASTEKSNIIRGWIFGTTLDSKTQSLLIVNNATNVVIKVCEFQFCNDPFLGVYYHKNNKSWMESEFRVYSSANNCTFEYVSQPFLMDLEGKQGNFKNLREFVFKNIDGYFKIYSKHTPINLVRDLPQGFSALEPLVDLPIGINITRFQTLLALHRSYLTPGDSSSGWTAGAAAYYVGYLQPRTFLLKYNENGTITDAVDCALDPLSETKCTLGSGGGGESQVRQQFSKDIEKLLNEQVNKEMQSSNLYMSMSSWCYTHSLDGAGLFLFDHAAEEYEHAKKLIIFLNENNVPVQLTSISAPEHKFEGLTQIFQKAYEHEQHISESINNIVDHAIKSKDHATFNFLQWYVAEQHEEEVLFKDILDKIELIGNENHGLYLADQYVKGIAKSRKSGS

SEQ ID NO: 121 - protein, 694 aa, Artificial Sequence
  Description of Artificial Sequence: Synthetic polypeptide
HHHHHHHHGPLEVLFQGPNITNLCPFGEVFNATRFASVYAWNRKRISNCVADYSVLYNSASFSTFKCYGVSPTKLNDLCFTNVYADSFVIRGDEVRQIAPGQTGKIADYNYKLPDDFTGCVIAWNSNNLDSKVGGNYNYLYRLFRKSNLKPFERDISTEIYQAGSTPCNGVEGFNCYRPLQSYGFQPTNGVGYQPYRVVVLSFELLHAPATVCGPGSGGSGSSQCVNLTTRTQLPPAYTNSFTRGVYYPDKVFRSSVLHSTQDLFLPFFSNVTWFHAIHVSGTNGTKRFDNPVLPFNDGVYFASTEKSNIIRGWIFGTTLDSKTQSLLIVNNATNVVIKVCEFQFCNDPFLGVYYHKNNKSWMESEFRVYSSANNCTFEYVSQPFLMDLEGKQGNFKNLREFVFKNIDGYFKIYSKHTPINLVRDLPQGFSALEPLVDLPIGINITRFQTLLALHRSYLTPGDSSSGWTAGAAAYYVGYLQPRTFLLKYNENGTITDAVDCALDPLSETKCTLGSGGGGESQVRQQFSKDIEKLLNEQVNKEMQSSNLYMSMSSWCYTHSLDGAGLFLFDHAAEEYEHAKKLIIFLNENNVPVQLTSISAPEHKFEGLTQIFQKAYEHEQHISESINNIVDHAIKSKDHATFNFLQWYVAEQHEEEVLFKDILDKIELIGNENHGLYLADQYVKGIAKSRKSGS

SEQ ID NO: 122 - protein, 694 aa, Artificial Sequence
  Description of Artificial Sequence: Synthetic polypeptide
HHHHHHHHGPLEVLFQGPNITNLCPFGEVFNATRFASVYAWNRKRISNCVADYSVLYNSASFSTFKCYGVSPTKLNDLCFTNVYADSFVIRGDEVRQIAPGQTGKIADYNYKLPDDFTGCVIAWNSNNLDSKVGGNYNYLYRLFRKSNLKPFERDISTEIYQAGSTPCNGVEGFNCYAPLQSYGFQPTNGVGYQPYRVVVLSFELLHAPATVCGPGSGGSGSSQCVNLTTRTQLPPAYTNSFTRGVYYPDKVFRSSVLHSTQDLFLPFFSNVTWFHAIHVSGTNGTKRFDNPVLPFNDGVYFASTEKSNIIRGWIFGTTLDSKTQSLLIVNNATNVVIKVCEFQFCNDPFLGVYYHKNNKSWMESEFRVYSSANNCTFEYVSQPFLMDLEGKQGNFKNLREFVFKNIDGYFKIYSKHTPINLVRDLPQGFSALEPLVDLPIGINITRFQTLLALHRSYLTPGDSSSGWTAGAAAYYVGYLQPRTFLLKYNENGTITDAVDCALDPLSETKCTLGSGGGGESQVRQQFSKDIEKLLNEQVNKEMQSSNLYMSMSSWCYTHSLDGAGLFLFDHAAEEYEHAKKLIIFLNENNVPVQLTSISAPEHKFEGLTQIFQKAYEHEQHISESINNIVDHAIKSKDHATFNFLQWYVAEQHEEEVLFKDILDKIELIGNENHGLYLADQYVKGIAKSRKSGS

SEQ ID NO: 123 - protein, 694 aa, Artificial Sequence
  Description of Artificial Sequence: Synthetic polypeptide
HHHHHHHHGPLEVLFQGPNITNLCPFGEVFNATRFASVYAWNRKRISNCVADYSVLYNSASFSTFKCYGVSPTKLNDLCFTNVYADSFVIRGDEVRQIAPGQTGKIADYNYKLPDDFTGCVIAWNSNNLDSKVGGNYNYLYRLFRKSNLKPFERDISTEIYQAGSTPCNGVEGFNCYFPLQSYGFQPTNGVGYQPYRVVVLSFENKSAPATVCGPGSGGSGSSQCVNLTTRTQLPPAYTNSFTRGVYYPDKVFRSSVLHSTQDLFLPFFSNVTWFHAIHVSGTNGTKRFDNPVLPFNDGVYFASTEKSNIIRGWIFGTTLDSKTQSLLIVNNATNVVIKVCEFQFCNDPFLGVYYHKNNKSWMESEFRVYSSANNCTFEYVSQPFLMDLEGKQGNFKNLREFVFKNIDGYFKIYSKHTPINLVRDLPQGFSALEPLVDLPIGINITRFQTLLALHRSYLTPGDSSSGWTAGAAAYYVGYLQPRTFLLKYNENGTITDAVDCALDPLSETKCTLGSGGGGESQVRQQFSKDIEKLLNEQVNKEMQSSNLYMSMSSWCYTHSLDGAGLFLFDHAAEEYEHAKKLIIFLNENNVPVQLTSISAPEHKFEGLTQIFQKAYEHEQHISESINNIVDHAIKSKDHATFNFLQWYVAEQHEEEVLFKDILDKIELIGNENHGLYLADQYVKGIAKSRKSGS

SEQ ID NO: 124 - protein, 694 aa, Artificial Sequence
  Description of Artificial Sequence: Synthetic polypeptide
HHHHHHHHGPLEVLFQGPNITNLCPFGEVFNATRFASVYAWNRKRISNCVADYSVLYNSASFSTFKCYGVSPTKLNDLCFTNVYADSFVIRGDEVRQIAPGQTGKIADYNYKLPDDFTGCVIAWNSNNLDSKVGGNYNYLYRLFRKSNLKPFERDISTEIYQAGSTPCNGVEGFNCYFPLQSYGFQPTNGVGYQPYRVVVLSFELRHAPATVCGPGSGGSGSSQCVNLTTRTQLPPAYTNSFTRGVYYPDKVFRSSVLHSTQDLFLPFFSNVTWFHAIHVSGTNGTKRFDNPVLPFNDGVYFASTEKSNIIRGWIFGTTLDSKTQSLLIVNNATNVVIKVCEFQFCNDPFLGVYYHKNNKSWMESEFRVYSSANNCTFEYVSQPFLMDLEGKQGNFKNLREFVFKNIDGYFKIYSKHTPINLVRDLPQGFSALEPLVDLPIGINITRFQTLLALHRSYLTPGDSSSGWTAGAAAYYVGYLQPRTFLLKYNENGTITDAVDCALDPLSETKCTLGSGGGGESQVRQQFSKDIEKLLNEQVNKEMQSSNLYMSMSSWCYTHSLDGAGLFLFDHAAEEYEHAKKLIIFLNENNVPVQLTSISAPEHKFEGLTQIFQKAYEHEQHISESINNIVDHAIKSKDHATFNFLQWYVAEQHEEEVLFKDILDKIELIGNENHGLYLADQYVKGIAKSRKSGS

SEQ ID NO: 125 - protein, 396 aa, Artificial Sequence
  Description of Artificial Sequence: Synthetic polypeptide
HHHHHHHHGPLEVLFQGPNITNLCPFGEVFNATRFASVYAWNRKRISNCVADYSVLYNSASFSTFKCYGVSPTKLNDLCFTNVYADSFVIRGDEVRQIAPGQTGKIADYNYKLPDDFTGCVIAWNSNNLDSKVGGNYNYLYRLFRKSNLKPFERDISTEIYQAGSTPCNGVEGFNCYAPLQSYGFQPTNGVGYQPYRVVVLSFENKSAPATVCGPGSGGGGESQVRQQFSKDIEKLLNEQVNKEMQSSNLYMSMSSWCYTHSLDGAGLFLFDHAAEEYEHAKKLIIFLNENNVPVQLTSISAPEHKFEGLTQIFQKAYEHEQHISESINNIVDHAIKSKDHATFNFLQWYVAEQHEEEVLFKDILDKIELIGNENHGLYLADQYVKGIAKSRKSGS

SEQ ID NO: 126 - protein, 396 aa, Artificial Sequence
  Description of Artificial Sequence: Synthetic polypeptide
HHHHHHHHGPLEVLFQGPNITNLCPFGEVFNATRFASVYAWNRKRISNCVADYSVLYNSASFSTFKCYGVSPTKLNDLCFTNVYADSFVIRGDEVRQIAPGQTGKIADYNYKLPDDFTGCVIAWNSNNLDSKVGGNYNYLYRLFRKSNLKPFERDISTEIYQAGSTPCNGVEGFNCYAPLQSYGFQPTNGVGYQPYRVVVLSFELRHAPATVCGPGSGGGGESQVRQQFSKDIEKLLNEQVNKEMQSSNLYMSMSSWCYTHSLDGAGLFLFDHAAEEYEHAKKLIIFLNENNVPVQLTSISAPEHKFEGLTQIFQKAYEHEQHISESINNIVDHAIKSKDHATFNFLQWYVAEQHEEEVLFKDILDKIELIGNENHGLYLADQYVKGIAKSRKSGS

SEQ ID NO: 127 - protein, 396 aa, Artificial Sequence
  Description of Artificial Sequence: Synthetic polypeptide
HHHHHHHHGPLEVLFQGPNITNLCPFGEVFNATRFASVYAWNRKRISNCVADYSVLYNSASFSTFKCYGVSPTKLNDLCFTNVYADSFVIRGDEVRQIAPGQTGKIADYNYKLPDDFTGCVIAWNSNNLDSKVGGNKNYLYRRFRKSNLKPFERDISTEIYQAGSTPCNGVEGFNCYRPLQSYGFQPTNGVGYQPYRVVVLSFENKSAPATVCGPGSGGGGESQVRQQFSKDIEKLLNEQVNKEMQSSNLYMSMSSWCYTHSLDGAGLFLFDHAAEEYEHAKKLIIFLNENNVPVQLTSISAPEHKFEGLTQIFQKAYEHEQHISESINNIVDHAIKSKDHATFNFLQWYVAEQHEEEVLFKDILDKIELIGNENHGLYLADQYVKGIAKSRKSGS

SEQ ID NO: 128 - protein, 396 aa, Artificial Sequence
  Description of Artificial Sequence: Synthetic polypeptide
HHHHHHHHGPLEVLFQGPNITNLCPFGEVFNATRFASVYAWNRKRISNCVADYSVLYNSASFSTFKCYGVSPTKLNDLCFTNVYADSFVIRGDEVRQIAPGQTGKIADYNYKLPDDFTGCVIAWNSNNLDSKVGGNKNYLYRRFRKSNLKPFERDISTEIYQAGSTPCNGVEGFNCYRPLQSYGFQPTNGVGYQPYRVVVLSFELRHAPATVCGPGSGGGGESQVRQQFSKDIEKLLNEQVNKEMQSSNLYMSMSSWCYTHSLDGAGLFLFDHAAEEYEHAKKLIIFLNENNVPVQLTSISAPEHKFEGLTQIFQKAYEHEQHISESINNIVDHAIKSKDHATFNFLQWYVAEQHEEEVLFKDILDKIELIGNENHGLYLADQYVKGIAKSRKSGS

SEQ ID NO: 129 - protein, 396 aa, Artificial Sequence
  Description of Artificial Sequence: Synthetic polypeptide
HHHHHHHHGPLEVLFQGPNITNLCPFGEVFNATRFASVYAWNRKRISNCVADYSVLYNSASFSTFKCYGVSPTKLNDLCFTNVYADSFVIRGDEVRQIAPGQTGKIADYNYKLPDDFTGCVIAWNSNNLDSKVGGNYNYLRRLFRKSNLKPFERDISTEIYQAGSTPCNGVEGFNCYFPLQSYGFQPTNGVGYQPYRVVVLSFENKSAPATVCGPGSGGGGESQVRQQFSKDIEKLLNEQVNKEMQSSNLYMSMSSWCYTHSLDGAGLFLFDHAAEEYEHAKKLIIFLNENNVPVQLTSISAPEHKFEGLTQIFQKAYEHEQHISESINNIVDHAIKSKDHATFNFLQWYVAEQHEEEVLFKDILDKIELIGNENHGLYLADQYVKGIAKSRKSGS

SEQ ID NO: 130 - protein, 396 aa, Artificial Sequence
  Description of Artificial Sequence: Synthetic polypeptide
HHHHHHHHGPLEVLFQGPNITNLCPFGEVFNATRFASVYAWNRKRISNCVADYSVLYNSASFSTFKCYGVSPTKLNDLCFTNVYADSFVIRGDEVRQIAPGQTGKIADYNYKLPDDFTGCVIAWNSNNLDSKVGGNYNYLRRLFRKSNLKPFERDISTEIYQAGSTPCNGVEGFNCYFPLQSYGFQPTNGVGYQPYRVVVLSFELRHAPATVCGPGSGGGGESQVRQQFSKDIEKLLNEQVNKEMQSSNLYMSMSSWCYTHSLDGAGLFLFDHAAEEYEHAKKLIIFLNENNVPVQLTSISAPEHKFEGLTQIFQKAYEHEQHISESINNIVDHAIKSKDHATFNFLQWYVAEQHEEEVLFKDILDKIELIGNENHGLYLADQYVKGIAKSRKSGS

SEQ ID NO: 131 - protein, 1271 aa, Artificial Sequence
  Description of Artificial Sequence: Synthetic polypeptide
VNLTTRTQLPPAYTNSFTRGVYYPDKVFRSSVLHSTQDLFLPFFSNVTWFHAIHVSGTNGTKRFDNPVLPFNDGVYFASTEKSNIIRGWIFGTTLDSKTQSLLIVNNATNVVIKVCEFQFCNDPFLGVYYHKNNKSWMESEFRVYSSANNCTFEYVSQPFLMDLEGKQGNFKNLREFVFKNIDGYFKIYSKHTPINLVRDLPQGFSALEPLVDLPIGINITRFQTLLALHRSYLTPGDSSSGWTAGAAAYYVGYLQPRTFLLKYNENGTITDAVDCALDPLSETKCTLKSFTVEKGIYQTSNFRVQPTESIVRFPNITNLCPFGEVFNATRFASVYAWNRKRISNCVADYSVLYNSASFSTFKCYGVSPTKLNDLCFTNVYADSFVIRGDEVRQIAPGQTGKIADYNYKLPDDFTGCVIAWNSNNLDSKVGGNYNYLYRLFRKSNLKPFERDISTEIYQAGSTPCNGVEGFNCYFPLQSYGFQPTNGVGYQPYRVVVLSFELLHAPATVCGPKKSTNLVKNKCVNFNFNGLTGTGVLTESNKKFLPFQQFGRDIADTTDAVRDPQTLEILDITPCSFGGVSVITPGTNTSNQVAVLYQGVNCTEVPVAIHADQLTPTWRVYSTGSNVFQTRAGCLIGAEHVNNSYECDIPIGAGICASYQTQTNSPGSASSVASQSIIAYTMSLGAENSVAYSNNSIAIPTNFTISVTTEILPVSMTKTSVDCTMYICGDSTECSNLLLQYGSFCTQLNRALTGIAVEQDKNTQEVFAQVKQIYKTPPIKDFGGFNFSQILPDPSKPSKRSFIEDLLFNKVTLADAGFIKQYGDCLGDIAARDLICAQKFNGLTVLPPLLTDEMIAQYTSALLAGTITSGWTFGAGAALQIPFAMQMAYRFNGIGVTQNVLYENQKLIANQFNSAIGKIQDSLSSTASALGKLQDVVNQNAQALNTLVKQLSSNFGAISSVLNDILSRLDPPEAEVQIDRLITGRLQSLQTYVTQQLIRAAEIRASANLAATKMSECVLGQSKRVDFCGKGYHLMSFPQSAPHGVVFLHVTYVPAQEKNFTTAPAICHDGKAHFPREGVFVSNGTHWFVTQRNFYEPQIITTDNTFVSGNCDVVIGIVNNTVYDPLQPELDSFKEELDKYFKNHTSPDVDLGDISGINASVVNIQKEIDRLNEVAKNLNESLIDLQELGKYEQGSGYIPEAPRDGQAYVRKDGEWVLLSTFLGLEVLFQGPSAWSHPQFEKGGGSGGGSGGSAWSHPQFEKGSHHHHHHHH

SEQ ID NO: 132 - protein, 1271 aa, Artificial Sequence
  Description of Artificial Sequence: Synthetic polypeptide
VNLTTRTQLPPAYTNSFTRGVYYPDKVFRSSVLHSTQDLFLPFFSNVTWFHAIHVSGTNGTKRFDNPVLPFNDGVYFASTEKSNIIRGWIFGTTLDSKTQSLLIVNNATNVVIKVCEFQFCNDPFLGVYYHKNNKSWMESEFRVYSSANNCTFEYVSQPFLMDLEGKQGNFKNLREFVFKNIDGYFKIYSKHTPINLVRDLPQGFSALEPLVDLPIGINITRFQTLLALHRSYLTPGDSSSGWTAGAAAYYVGYLQPRTFLLKYNENGTITDAVDCALDPLSETKCTLKSFTVEKGIYQTSNFRVQPTESIVRFPNITNLCPFGEVFNATRFASVYAWNRKRISNCVADYSVLYNSASFSTFKCYGVSPTKLNDLCFTNVYADSFVIRGDEVRQIAPGQTGKIADYNYKLPDDFTGCVIAWNSNNLDSKVGGNYNYLYRLFRKSNLKPFERDISTEIYQAGSTPCNGVEGFNCYFPLQSYGFQPTNGVGYQPYRVVVLSFELLHAPATVCGPKKSTNLVKNKCVNFNFNGLTGTGVLTESNKKFLPFQQFGRDIADTTDAVRDPQTLEILDITPCSFGGVSVITPGTNTSNQVAVLYQDVNCTEVPVAIHADQLTPTWRVYSTGSNVFQTRAGCLIGAEHVNNSYECDIPIGAGICASYQTQTNSPGSASSVASQSIIAYTMSLGAENSVAYSNNSIAIPTNFTISVTTEILPVSMTKTSVDCTMYICGDSTECSNLLLQYGSFCTQLNRALTGIAVEQDKNTQEVFAQVKQIYKTPPIKDFGGFNFSQILPDPSKPSKRSFIEDLLFNKVTLADAGFIKQYGDCLGDIAARDLICAQKFNGLTVLPPLLTDEMIAQYTSALLAGTITSGWTFGAGAALQIPFAMQMAYRFNGIGVTQNVLYENQKLIANQFNSAIGKIQDSLSSTASALGKLQDVVNQNAQALNTLVKQLSSNFGAISSVLNDILSRLDKVEAEVQIDRLITGRLQSLQTYVTQQLIRAAEIRASANLAATKMSECVLGQSKRVDFCGKGYHLMSFPQSAPHGVVFLHVTYVPAQEKNFTTAPAICHDGKAHFPREGVFVSNGTHWFVTQRNFYEPQIITTDNTFVSGNCDVVIGIVNNTVYDPLQPELDSFKEELDKYFKNHTSPDVDLGDISGINASVVNIQKEIDRLNEVAKNLNESLIDLQELGKYEQGSGYIPEAPRDGQAYVRKDGEWVLLSTFLGLEVLFQGPSAWSHPQFEKGGGSGGGSGGSAWSHPQFEKGSHHHHHHHH

SEQ ID NO: 133 - protein, 1271 aa, Artificial Sequence
  Description of Artificial Sequence: Synthetic polypeptide
VNLTTRTQLPPAYTNSFTRGVYYPDKVFRSSVLHSTQDLFLPFFSNVTWFHAIHVSGTNGTKRFDNPVLPFNDGVYFASTEKSNIIRGWIFGTTLDSKTQSLLIVNNATNVVIKVCEFQFCNDPFLGVYYHKNNKSWMESEFRVYSSANNCTFEYVSQPFLMDLEGKQGNFKNLREFVFKNIDGYFKIYSKHTPINLVRDLPQGFSALEPLVDLPIGINITRFQTLLALHRSYLTPGDSSSGWTAGAAAYYVGYLQPRTFLLKYNENGTITDAVDCALDPLSETKCTLKSFTVEKGIYQTSNFRVQPTESIVRFPNITNLCPFGEVFNATRFASVYAWNRKRISNCVADYSVLYNSASFSTFKCYGVSPTKLNDLCFTNVYADSFVIRGDEVRQIAPGQTGKIADYNYKLPDDFTGCVIAWNSNNLDSKVGGNYNYLYRLFRKSNLKPFERDISTEIYQAGSTPCNGVEGFNCYFPLQSYGFQPTNGVGYQPYRVVVLSFELLHAPATVCGPKKSTNLVKNKCVNFNFNGLTGTGVLTESNKKFLPFQQFGRDIADTTDAVRDPQTLEILDITPCSFGGVSVITPGTNTSNQVAVLYQGVNCTEVPVAIHADQLTPTWRVYSTGSNVFQTRAGCLIGAEHVNNSYECDIPIGAGICASYQTQTNSPGSASSVASQSIIAYTMSLGAENSVAYSNNSIAIPTNFTISVTTEILPVSMTKTSVDCTMYICGDSTECSNLLLQYGSFCTQLNRALTGIAVEQDKNTQEVFAQVKQIYKTPPIKDFGGFNFSQILPDPSKPSKRSFIEDLLFNKVTLADAGFIKQYGDCLGDIAARDLICAQKFNGLTVLPPLLTDEMIAQYTSALLAGTITSGWTFGAGAALQIPFAMQMAYRFNGIGVTQNVLYENQKLIANQFNSAIGKIQDSLSSTASALGKLQDVVNQNAQALNTLVKQLSSNFGAISSVLNDILSRLDKVEAEVQIDRLITGRLQSLQTYVTQQLIRAAEIRASANLAATKMSECVLGQSKRVDFCGKGYHLMSFPQSAPHGVVFLHVTYVPAQEKNFTTAPAICHDGKAHFPREGVFVSNGTHWFVTQRNFYEPQIITTDNTFVSGNCDVVIGIVNNTVYDPLQPELDSFKEELDKYFKNHTSPDVDLGDISGINASVVNIQKEIDRLNEVAKNLNESLIDLQELGKYEQGSGYIPEAPRDGQAYVRKDGEWVLLSTFLGLEVLFQGPSAWSHPQFEKGGGSGGGSGGSAWSHPQFEKGSHHHHHHHH

SEQ ID NO: 134 - protein, 1271 aa, Artificial Sequence
  Description of Artificial Sequence: Synthetic polypeptide
VNLTTRTQLPPAYTNSFTRGVYYPDKVFRSSVLHSTQDLFLPFFSNVTWFHAIHVSGTNGTKRFDNPVLPFNDGVYFASTEKSNIIRGWIFGTTLDSKTQSLLIVNNATNVVIKVCEFQFCNDPFLGVYYHKNNKSWMESEFRVYSSANNCTFEYVSQPFLMDLEGKQGNFKNLREFVFKNIDGYFKIYSKHTPINLVRDLPQGFSALEPLVDLPIGINITRFQTLLALHRSYLTPGDSSSGWTAGAAAYYVGYLQPRTFLLKYNENGTITDAVDCALDPLSETKCTLKSFTVEKGIYQTSNFRVQPTESIVRFPNITNLCPFGEVFNATRFASVYAWNRKRISNCVADYSVLYNSASFSTFKCYGVSPTKLNDLCFTNVYADSFVIRGDEVRQIAPGQTGKIADYNYKLPDDFTGCVIAWNSNNLDSKVGGNYNYLYRLFRKSNLKPFERDISTEIYQAGSTPCNGVEGFNCYFPLQSYGFQPTNGVGYQPYRVVVLSFELLHAPATVCGPKKSTNLVKNKCVNFNFNGLTGTGVLTESNKKFLPFQQFGRDIADTTDAVRDPQTLEILDITPCSFGGVSVITPGTNTSNQVAVLYQDVNCTEVPVAIHADQLTPTWRVYSTGSNVFQTRAGCLIGAEHVNNSYECDIPIGAGICASYQTQTNSPRRARSVASQSIIAYTMSLGAENSVAYSNNSIAIPTNFTISVTTEILPVSMTKTSVDCTMYICGDSTECSNLLLQYGSFCTQLNRALTGIAVEQDKNTQEVFAQVKQIYKTPPIKDFGGFNFSQILPDPSKPSKRSFIEDLLFNKVTLADAGFIKQYGDCLGDIAARDLICAQKFNGLTVLPPLLTDEMIAQYTSALLAGTITSGWTFGAGAALQIPFAMQMAYRFNGIGVTQNVLYENQKLIANQFNSAIGKIQDSLSSTASALGKLQDVVNQNAQALNTLVKQLSSNFGAISSVLNDILSRLDKVEAEVQIDRLITGRLQSLQTYVTQQLIRAAEIRASANLAATKMSECVLGQSKRVDFCGKGYHLMSFPQSAPHGVVFLHVTYVPAQEKNFTTAPAICHDGKAHFPREGVFVSNGTHWFVTQRNFYEPQIITTDNTFVSGNCDVVIGIVNNTVYDPLQPELDSFKEELDKYFKNHTSPDVDLGDISGINASVVNIQKEIDRLNEVAKNLNESLIDLQELGKYEQGSGYIPEAPRDGQAYVRKDGEWVLLSTFLGLEVLFQGPSAWSHPQFEKGGGSGGGSGGSAWSHPQFEKGSHHHHHHHH

SEQ ID NO: 135 - protein, 1271 aa, Artificial Sequence
  Description of Artificial Sequence: Synthetic polypeptide
VNLTTRTQLPPAYTNSFTRGVYYPDKVFRSSVLHSTQDLFLPFFSNVTWFHAIHVSGTNGTKRFDNPVLPFNDGVYFASTEKSNIIRGWIFGTTLDSKTQSLLIVNNATNVVIKVCEFQFCNDPFLGVYYHKNNKSWMESEFRVYSSANNCTFEYVSQPFLMDLEGKQGNFKNLREFVFKNIDGYFKIYSKHTPINLVRDLPQGFSALEPLVDLPIGINITRFQTLLALHRSYLTPGDSSSGWTAGAAAYYVGYLQPRTFLLKYNENGTITDAVDCALDPLSETKCTLKSFTVEKGIYQTSNFRVQPTESIVRFPNITNLCPFGEVFNATRFASVYAWNRKRISNCVADYSVLYNSASFSTFKCYGVSPTKLNDLCFTNVYADSFVIRGDEVRQIAPGQTGKIADYNYKLPDDFTGCVIAWNSNNLDSKVGGNYNYLYRLFRKSNLKPFERDISTEIYQAGSTPCNGVEGFNCYFPLQSYGFQPTNGVGYQPYRVVVLSFELLHAPATVCGPKKSTNLVKNKCVNFNFNGLTGTGVLTESNKKFLPFQQFGRDIADTTDAVRDPQTLEILDITPCSFGGVSVITPGTNTSNQVAVLYQGVNCTEVPVAIHADQLTPTWRVYSTGSNVFQTRAGCLIGAEHVNNSYECDIPIGAGICASYQTQTNSPRRARSVASQSIIAYTMSLGAENSVAYSNNSIAIPTNFTISVTTEILPVSMTKTSVDCTMYICGDSTECSNLLLQYGSFCTQLNRALTGIAVEQDKNTQEVFAQVKQIYKTPPIKDFGGFNFSQILPDPSKPSKRSFIEDLLFNKVTLADAGFIKQYGDCLGDIAARDLICAQKFNGLTVLPPLLTDEMIAQYTSALLAGTITSGWTFGAGAALQIPFAMQMAYRFNGIGVTQNVLYENQKLIANQFNSAIGKIQDSLSSTASALGKLQDVVNQNAQALNTLVKQLSSNFGAISSVLNDILSRLDKVEAEVQIDRLITGRLQSLQTYVTQQLIRAAEIRASANLAATKMSECVLGQSKRVDFCGKGYHLMSFPQSAPHGVVFLHVTYVPAQEKNFTTAPAICHDGKAHFPREGVFVSNGTHWFVTQRNFYEPQIITTDNTFVSGNCDVVIGIVNNTVYDPLQPELDSFKEELDKYFKNHTSPDVDLGDISGINASVVNIQKEIDRLNEVAKNLNESLIDLQELGKYEQGSGYIPEAPRDGQAYVRKDGEWVLLSTFLGLEVLFQGPSAWSHPQFEKGGGSGGGSGGSAWSHPQFEKGSHHHHHHHH

SEQ ID NO: 136 - protein, 694 aa, Artificial Sequence
  Description of Artificial Sequence: Synthetic polypeptide
HHHHHHHHGPLEVLFQGPNITNLCPFGEVFNATRFASVYAWNRKRISNCVADYSVLYNSASFSTFKCYGVSPTKLNDLCFTNVYADSFVIRGDEVRQIAPGQTGKIADYNYKLPDDFTGCVIAWNSNNLDSKVGGNYNYLRRLFRKSNLKPFERDISTEIYQAGSTPCNGVEGFNCYFPLQSYGFQPTNGVGYQPYRVVVLSFENKSAPATVCGPGSGGSGSSQCVNLTTRTQLPPAYTNSFTRGVYYPDKVFRSSVLHSTQDLFLPFFSNVTWFHAIHVSGTNGTKRFDNPVLPFNDGVYFASTEKSNIIRGWIFGTTLDSKTQSLLIVNNATNVVIKVCEFQFCNDPFLGVYYHKNNKSWMESEFRVYSSANNCTFEYVSQPFLMDLEGKQGNFKNLREFVFKNIDGYFKIYSKHTPINLVRDLPQGFSALEPLVDLPIGINITRFQTLLALHRSYLTPGDSSSGWTAGAAAYYVGYLQPRTFLLKYNENGTITDAVDCALDPLSETKCTLGSGGGGESQVRQQFSKDIEKLLNEQVNKEMQSSNLYMSMSSWCYTHSLDGAGLFLFDHAAEEYEHAKKLIIFLNENNVPVQLTSISAPEHKFEGLTQIFQKAYEHEQHISESINNIVDHAIKSKDHATFNFLQWYVAEQHEEEVLFKDILDKIELIGNENHGLYLADQYVKGIAKSRKSGS

SEQ ID NO: 137 - protein, 694 aa, Artificial Sequence
  Description of Artificial Sequence: Synthetic polypeptide
HHHHHHHHGPLEVLFQGPNITNLCPFGEVFNATRFASVYAWNRKRISNCVADYSVLYNSASFSTFKCYGVSPTKLNDLCFTNVYADSFVIRGDEVRQIAPGQTGKIADYNYKLPDDFTGCVIAWNSNNLDSKVGGNYNYLYRLFRKSNLKPFERDISTEIYQAGSTPCNGVEGFNCYAPLQSYGFQPTNGVGYQPYRVVVLSFENKSAPATVCGPGSGGSGSSQCVNLTTRTQLPPAYTNSFTRGVYYPDKVFRSSVLHSTQDLFLPFFSNVTWFHAIHVSGTNGTKRFDNPVLPFNDGVYFASTEKSNIIRGWIFGTTLDSKTQSLLIVNNATNVVIKVCEFQFCNDPFLGVYYHKNNKSWMESEFRVYSSANNCTFEYVSQPFLMDLEGKQGNFKNLREFVFKNIDGYFKIYSKHTPINLVRDLPQGFSALEPLVDLPIGINITRFQTLLALHRSYLTPGDSSSGWTAGAAAYYVGYLQPRTFLLKYNENGTITDAVDCALDPLSETKCTLGSGGGGESQVRQQFSKDIEKLLNEQVNKEMQSSNLYMSMSSWCYTHSLDGAGLFLFDHAAEEYEHAKKLIIFLNENNVPVQLTSISAPEHKFEGLTQIFQKAYEHEQHISESINNIVDHAIKSKDHATFNFLQWYVAEQHEEEVLFKDILDKIELIGNENHGLYLADQYVKGIAKSRKSGS

SEQ ID NO: 138 - protein, 856 aa, Artificial Sequence
  Description of Artificial Sequence: Synthetic polypeptide
SSQCVNLTTRTQLPPAYTNSFTRGVYYPDKVFRSSVLHSTQDLFLPFFSNVTWFHAIHVSGTNGTKRFDNPVLPFNDGVYFASTEKSNIIRGWIFGTTLDSKTQSLLIVNNATNVVIKVCEFQFCNDPFLGVYYHKNNKSWMESEFRVYSSANNCTFEYVSQPFLMDLEGKQGNFKNLREFVFKNIDGYFKIYSKHTPINLVRDLPQGFSALEPLVDLPIGINITRFQTLLALHRSYLTPGDSSSGWTAGAAAYYVGYLQPRTFLLKYNENGTITDAVDCALDPLSETKCTLKSFTVEKGIYQTSNFRVQPTESIVRFPNITNLCPFGEVFNATRFASVYAWNRKRISNCVADYSVLYNSASFSTFKCYGVSPTKLNDLCFTNVYADSFVIRGDEVRQIAPGQTGKIADYNYKLPDDFTGCVIAWNSNNLDSKVGGNYNYLYRLFRKSNLKPFERDISTEIYQAGSTPCNGVEGFNCYFPLQSYGFQPTNGVGYQPYRVVVLSFENKSAPATVCGPKKSTNLVKNKCVNFNFNGLTGTGVLTESNKKFLPFQQFGRDIADTTDAVRDPQTLEILDITPCSFGGVSVITPGTNTSNQVAVLYQDVNCTEVPVAIHADQLTPTWRVYSTGSNVFQTRAGCLIGAEHVNNSYECDIPIGAGICASYQTGGSQSIIAYTGSGGGGESQVRQQFSKDIEKLLNEQVNKEMQSSNLYMSMSSWCYTHSLDGAGLFLFDHAAEEYEHAKKLIIFLNENNVPVQLTSISAPEHKFEGLTQIFQKAYEHEQHISESINNIVDHAIKSKDHATFNFLQWYVAEQHEEEVLFKDILDKIELIGNENHGLYLADQYVKGIAKSRKSGS

SEQ ID NO: 139 - protein, 856 aa, Artificial Sequence
  Description of Artificial Sequence: Synthetic polypeptide
SSQCVNLTTRTQLPPAYTNSFTRGVYYPDKVFRSSVLHSTQDLFLPFFSNVTWFHAIHVSGTNGTKRFDNPVLPFNDGVYFASTEKSNIIRGWIFGTTLDSKTQSLLIVNNATNVVIKVCEFQFCNDPFLGVYYHKNNKSWMESEFRVYSSANNCTFEYVSQPFLMDLEGKQGNFKNLREFVFKNIDGYFKIYSKHTPINLVRDLPQGFSALEPLVDLPIGINITRFQTLLALHRSYLTPGDSSSGWTAGAAAYYVGYLQPRTFLLKYNENGTITDAVDCALDPLSETKCTLKSFTVEKGIYQTSNFRVQPTESIVRFPNITNLCPFGEVFNATRFASVYAWNRKRISNCVADYSVLYNSASFSTFKCYGVSPTKLNDLCFTNVYADSFVIRGDEVRQIAPGQTGKIADYNYKLPDDFTGCVIAWNSNNLDSKVGGNKNYLYRRFRKSNLKPFERDISTEIYQAGSTPCNGVEGFNCYRPLQSYGFQPTNGVGYQPYRVVVLSFENKSAPATVCGPKKSTNLVKNKCVNFNFNGLTGTGVLTESNKKFLPFQQFGRDIADTTDAVRDPQTLEILDITPCSFGGVSVITPGTNTSNQVAVLYQDVNCTEVPVAIHADQLTPTWRVYSTGSNVFQTRAGCLIGAEHVNNSYECDIPIGAGICASYQTGGSQSIIAYTGSGGGGESQVRQQFSKDIEKLLNEQVNKEMQSSNLYMSMSSWCYTHSLDGAGLFLFDHAAEEYEHAKKLIIFLNENNVPVQLTSISAPEHKFEGLTQIFQKAYEHEQHISESINNIVDHAIKSKDHATFNFLQWYVAEQHEEEVLFKDILDKIELIGNENHGLYLADQYVKGIAKSRKSGS

SEQ ID NO: 140 - protein, 856 aa, Artificial Sequence
  Description of Artificial Sequence: Synthetic polypeptide
SSQCVNLTTRTQLPPAYTNSFTRGVYYPDKVFRSSVLHSTQDLFLPFFSNVTWFHAIHVSGTNGTKRFDNPVLPFNDGVYFASTEKSNIIRGWIFGTTLDSKTQSLLIVNNATNVVIKVCEFQFCNDPFLGVYYHKNNKSWMESEFRVYSSANNCTFEYVSQPFLMDLEGKQGNFKNLREFVFKNIDGYFKIYSKHTPINLVRDLPQGFSALEPLVDLPIGINITRFQTLLALHRSYLTPGDSSSGWTAGAAAYYVGYLQPRTFLLKYNENGTITDAVDCALDPLSETKCTLKSFTVEKGIYQTSNFRVQPTESIVRFPNITNLCPFGEVFNATRFASVYAWNRKRISNCVADYSVLYNSASFSTFKCYGVSPTKLNDLCFTNVYADSFVIRGDEVRQIAPGQTGKIADYNYKLPDDFTGCVIAWNSNNLDSKVGGNYNYLYRLFRKSNLKPFERDISTEIYQAGSTPCNGVEGFNCYAPLQSYGFQPTNGVGYQPYRVVVLSFENKSAPATVCGPKKSTNLVKNKCVNFNFNGLTGTGVLTESNKKFLPFQQFGRDIADTTDAVRDPQTLEILDITPCSFGGVSVITPGTNTSNQVAVLYQDVNCTEVPVAIHADQLTPTWRVYSTGSNVFQTRAGCLIGAEHVNNSYECDIPIGAGICASYQTGGSQSIIAYTGSGGGGESQVRQQFSKDIEKLLNEQVNKEMQSSNLYMSMSSWCYTHSLDGAGLFLFDHAAEEYEHAKKLIIFLNENNVPVQLTSISAPEHKFEGLTQIFQKAYEHEQHISESINNIVDHAIKSKDHATFNFLQWYVAEQHEEEVLFKDILDKIELIGNENHGLYLADQYVKGIAKSRKSGS

SEQ ID NO: 141 - protein, 694 aa, Artificial Sequence
  Description of Artificial Sequence: Synthetic polypeptide
HHHHHHHHGPLEVLFQGPSSQCVNLTTRTQLPPAYTNSFTRGVYYPDKVFRSSVLHSTQDLFLPFFSNVTWFHAIHVSGTNGTKRFDNPVLPFNDGVYFASTEKSNIIRGWIFGTTLDSKTQSLLIVNNATNVVIKVCEFQFCNDPFLGVYYHKNNKSWMESEFRVYSSANNCTFEYVSQPFLMDLEGKQGNFKNLREFVFKNIDGYFKIYSKHTPINLVRDLPQGFSALEPLVDLPIGINITRFQTLLALHRSYLTPGDSSSGWTAGAAAYYVGYLQPRTFLLKYNENGTITDAVDCALDPLSETKCTLGSGGSGNITNLCPFGEVFNATRFASVYAWNRKRISNCVADYSVLYNSASFSTFKCYGVSPTKLNDLCFTNVYADSFVIRGDEVRQIAPGQTGKIADYNYKLPDDFTGCVIAWNSNNLDSKVGGNYNYLYRLFRKSNLKPFERDISTEIYQAGSTPCNGVEGFNCYAPLQSYGFQPTNGVGYQPYRVVVLSFENKSAPATVCGPGSGGGGESQVRQQFSKDIEKLLNEQVNKEMQSSNLYMSMSSWCYTHSLDGAGLFLFDHAAEEYEHAKKLIIFLNENNVPVQLTSISAPEHKFEGLTQIFQKAYEHEQHISESINNIVDHAIKSKDHATFNFLQWYVAEQHEEEVLFKDILDKIELIGNENHGLYLADQYVKGIAKSRKSGS

SEQ ID NO: 142 - protein, 694 aa, Artificial Sequence
  Description of Artificial Sequence: Synthetic polypeptide
HHHHHHHHGPLEVLFQGPSSQCVNLTTRTQLPPAYTNSFTRGVYYPDKVFRSSVLHSTQDLFLPFFSNVTWFHAIHVSGTNGTKRFDNPVLPFNDGVYFASTEKSNIIRGWIFGTTLDSKTQSLLIVNNATNVVIKVCEFQFCNDPFLGVYYHKNNKSWMESEFRVYSSANNCTFEYVSQPFLMDLEGKQGNFKNLREFVFKNIDGYFKIYSKHTPINLVRDLPQGFSALEPLVDLPIGINITRFQTLLALHRSYLTPGDSSSGWTAGAAAYYVGYLQPRTFLLKYNENGTITDAVDCALDPLSETKCTLGSGGSGNITNLCPFGEVFNATRFASVYAWNRKRISNCVADYSVLYNSASFSTFKCYGVSPTKLNDLCFTNVYADSFVIRGDEVRQIAPGQTGKIADYNYKLPDDFTGCVIAWNSNNLDSKVGGNYNYLYRLFRKSNLKPFERDISTEIYQAGSTPCNGVEGFNCYFPLQSYGFQPTNGVGYQPYRVVVLSFELLHAPATVCGPGSGGGGESQVRQQFSKDIEKLLNEQVNKEMQSSNLYMSMSSWCYTHSLDGAGLFLFDHAAEEYEHAKKLIIFLNENNVPVQLTSISAPEHKFEGLTQIFQKAYEHEQHISESINNIVDHAIKSKDHATFNFLQWYVAEQHEEEVLFKDILDKIELIGNENHGLYLADQYVKGIAKSRKSGS

SEQ ID NO: 143 - protein, 856 aa, Artificial Sequence
  Description of Artificial Sequence: Synthetic polypeptide
SSQCVNLTTRTQLPPAYTNSFTRGVYYPDKVFRSSVLHSTQDLFLPFFSNVTWFHAIHVSGTNGTKRFDNPVLPFNDGVYFASTEKSNIIRGWIFGTTLDSKTQSLLIVNNATNVVIKVCEFQFCNDPFLGVYYHKNNKSWMESEFRVYSSANNCTFEYVSQPFLMDLEGKQGNFKNLREFVFKNIDGYFKIYSKHTPINLVRDLPQGFSALEPLVDLPIGINITRFQTLLALHRSYLTPGDSSSGWTAGAAAYYVGYLQPRTFLLKYNENGTITDAVDCALDPLSETKCTLKSFTVEKGIYQTSNFRVQPTESIVRFPNITNLCPFGEVFNATRFASVYAWNRKRISNCVADYSVLYNSASFSTFKCYGVSPTKLNDLCFTNVYADSFVIRGDEVRQIAPGQTGKIADYNYKLPDDFTGCVIAWNSNNLDSKVGGNKNYLYRRFRKSNLKPFERDISTEIYQAGSTPCNGVEGFNCYRPLQSYGFQPTNGVGYQPYRVVVLSFELLHAPATVCGPKKSTNLVKNKCVNFNFNGLTGTGVLTESNKKFLPFQQFGRDIADTTDAVRDPQTLEILDITPCSFGGVSVITPGTNTSNQVAVLYQDVNCTEVPVAIHADQLTPTWRVYSTGSNVFQTRAGCLIGAEHVNNSYECDIPIGAGICASYQTGGSQSIIAYTGSGGGGESQVRQQFSKDIEKLLNEQVNKEMQSSNLYMSMSSWCYTHSLDGAGLFLFDHAAEEYEHAKKLIIFLNENNVPVQLTSISAPEHKFEGLTQIFQKAYEHEQHISESINNIVDHAIKSKDHATFNFLQWYVAEQHEEEVLFKDILDKIELIGNENHGLYLADQYVKGIAKSRKSGS

SEQ ID NO: 144 - protein, 1318 aa, Artificial Sequence
  Description of Artificial Sequence: Synthetic polypeptide
SSQCVNLTTRTQLPPAYTNSFTRGVYYPDKVFRSSVLHSTQDLFLPFFSNVTWFHAIHVSGTNGTKRFDNPVLPFNDGVYFASTEKSNIIRGWIFGTTLDSKTQSLLIVNNATNVVIKVCEFQFCNDPFLGVYYHKNNKSWMESEFRVYSSANNCTFEYVSQPFLMDLEGKQGNFKNLREFVFKNIDGYFKIYSKHTPINLVRDLPQGFSALEPLVDLPIGINITRFQTLLALHRSYLTPGDSSSGWTAGAAAYYVGYLQPRTFLLKYNENGTITDAVDCALDPLSETKCTLKSFTVEKGIYQTSNFRVQPTESIVRFPNITNLCPFGEVFNATRFASVYAWNRKRISNCVADYSVLYNSASFSTFKCYGVSPTKLNDLCFTNVYADSFVIRGDEVRQIAPGQTGKIADYNYKLPDDFTGCVIAWNSNNLDSKVGGNYNYLYRLFRKSNLKPFERDISTEIYQAGSTPCNGVEGFNCYFPLQSYGFQPTNGVGYQPYRVVVLSFELLHAPATVCGPKKSTNLVKNKCVNFNFNGLTGTGVLTESNKKFLPFQQFGRDIADTTDAVRDPQTLEILDITPCSFGGVSVITPGTNTSNQVAVLYQGVNCTEVPVAIHADQLTPTWRVYSTGSNVFQTRAGCLIGAEHVNNSYECDIPIGAGICASYQTQTNSPGSASSVASQSIIAYTMSLGAENSVAYSNNSIAIPTNFTISVTTEILPVSMTKTSVDCTMYICGDSTECSNLLLQYGSFCTQLNRALTGIAVEQDKNTQEVFAQVKQIYKTPPIKDFGGFNFSQILPDPSKPSKRSFIEDLLFNKVTLADAGFIKQYGDCLGDIAARDLICAQKFNGLTVLPPLLTDEMIAQYTSALLAGTITSGWTFGAGAALQIPFAMQMAYRFNGIGVTQNVLYENQKLIANQFNSAIGKIQDSLSSTASALGKLQDVVNQNAQALNTLVKQLSSNFGAISSVLNDILSRLDPPEAEVQIDRLITGRLQSLQTYVTQQLIRAAEIRASANLAATKMSECVLGQSKRVDFCGKGYHLMSFPQSAPHGVVFLHVTYVPAQEKNFTTAPAICHDGKAHFPREGVFVSNGTHWFVTQRNFYEPQIITTDNTFVSGNCDVVIGIVNNTVYDPLQSELDSIKEELDKIHKNGSGGSGDIIKLLNEQVNKEMQSSNLYMSMSSWCYTHSLDGAGLFLFDHAAEEYEHAKKLIIFLNENNVPVQLTSISAPEHKFEGLTQIFQKAYEHEQHISESINNIVDHAIKSKDHATFNFLQWYVAEQHEEEVLFKDILDKIELIGNENHGLYLADQYVKGIAKSRKSGS

SEQ ID NO: 145 - protein, 1310 aa, Artificial Sequence
  Description of Artificial Sequence: Synthetic polypeptide
VNLTTRTQLPPAYTNSFTRGVYYPDKVFRSSVLHSTQDLFLPFFSNVTWFHAIHVSGTNGTKRFDNPVLPFNDGVYFASTEKSNIIRGWIFGTTLDSKTQSLLIVNNATNVVIKVCEFQFCNDPFLGVYYHKNNKSWMESEFRVYSSANNCTFEYVSQPFLMDLEGKQGNFKNLREFVFKNIDGYFKIYSKHTPINLVRDLPQGFSALEPLVDLPIGINITRFQTLLALHRSYLTPGDSSSGWTAGAAAYYVGYLQPRTFLLKYNENGTITDAVDCALDPLSETKCTLKSFTVEKGIYQTSNFRVQPTESIVRFPNITNLCPFGEVFNATRFASVYAWNRKRISNCVADYSVLYNSASFSTFKCYGVCPTKLNDLCFTNVYADSFVIRGDEVRQIAPGQTGKIADYNYKLPDDFTGCVIAWNSNNLDSKVGGNYNYLYRLFRKSNLKPFERDISTEIYQAGSTPCNGVEGFNCYFPLQSYGFQPTNGVGYQPYRVVVLSFELLHAPATVCGPKKSTNLVKNKCVNFNFNGLTGTGVLTESNKKFLPFQQFGRDIADTTDAVRDPQTLEILDITPCSFGGVSVITPGTNTSNQVAVLYQDVNCTEVPVAIHADQLTPTWRVYSTGSNVFQTRAGCLIGAEHVNNSYECDIPIGAGICASYQTQTNSPGSASSVASQSIIAYTMSLGAENSVAYSNNSIAIPTNFTISVTTEILPVSMTKTSVDCTMYICGDSTECSNLLLQYGSFCTQLNRALTGIAVEQDKNTQEVFAQVKQIYKTPPIKDFGGFNFSQILPDPSKPSKRSFIEDLLFNKVTLADAGFIKQYGDCLGDIAARDLICAQKFNGLTVLPPLLTDEMIAQYTSALLAGTITSGWTFGAGAALQIPFAMQMAYRFNGIGVTQNVLYENQKLIANQFNSAIGKIQDSLSSTASALGKLQDVVNQNAQALNTLVKQLSSNFGAISSVLNDILSRLCPPEAEVQIDRLITGRLQSLQTYVTQQLIRAAEIRASANLAATKMSECVLGQSKRVDFCGKGYHLMSFPQSAPHGVVFLHVTYVPAQEKNFTTAPAICHDGKAHFPREGVFVSNGTHWFVTQRNFYEPQIITTDNTFVSGNCDVVIGIVNNTVYDPLQPELDSFKEELDKGSGGSGDIIKLLNEQVNKEMQSSNLYMSMSSWCYTHSLDGAGLFLFDHAAEEYEHAKKLIIFLNENNVPVQLTSISAPEHKFEGLTQIFQKAYEHEQHISESINNIVDHAIKSKDHATFNFLQWYVAEQHEEEVLFKDILDKIELIGNENHGLYLADQYVKGIAKSRKSGS

SEQ ID NO: 146 - protein, 1318 aa, Artificial Sequence
  Description of Artificial Sequence: Synthetic polypeptide
SSQCVNLTTRTQLPPAYTNSFTRGVYYPDKVFRSSVLHSTQDLFLPFFSNVTWFHAIHVSGTNGTKRFDNPVLPFNDGVYFASTEKSNIIRGWIFGTTLDSKTQSLLIVNNATNVVIKVCEFQFCNDPFLGVYYHKNNKSWMESEFRVYSSANNCTFEYVSQPFLMDLEGKQGNFKNLREFVFKNIDGYFKIYSKHTPINLVRDLPQGFSALEPLVDLPIGINITRFQTLLALHRSYLTPGDSSSGWTAGAAAYYVGYLQPRTFLLKYNENGTITDAVDCALDPLSETKCTLKSFTVEKGIYQTSNFRVQPTESIVRFPNITNLCPFGEVFNATRFASVYAWNRKRISNCVADYSVLYNSASFSTFKCYGVCPTKLNDLCFTNVYADSFVIRGDEVRQIAPGQTGKIADYNYKLPDDFTGCVIAWNSNNLDSKVGGNYNYLYRLFRKSNLKPFERDISTEIYQAGSTPCNGVEGFNCYFPLQSYGFQPTNGVGYQPYRVVVLSFELLHAPATVCGPKKSTNLVKNKCVNFNFNGLTGTGVLTESNKKFLPFQQFGRDIADTTDAVRDPQTLEILDITPCSFGGVSVITPGTNTSNQVAVLYQDVNCTEVPVAIHADQLTPTWRVYSTGSNVFQTRAGCLIGAEHVNNSYECDIPIGAGICASYQTQTNSPGSASSVASQSIIAYTMSLGAENSVAYSNNSIAIPTNFTISVTTEILPVSMTKTSVDCTMYICGDSTECSNLLLQYGSFCTQLNRALTGIAVEQDKNTQEVFAQVKQIYKTPPIKDFGGFNFSQILPDPSKPSKRSFIEDLLFNKVTLADAGFIKQYGDCLGDIAARDLICAQKFNGLTVLPPLLTDEMIAQYTSALLAGTITSGWTFGAGAALQIPFAMQMAYRFNGIGVTQNVLYENQKLIANQFNSAIGKIQDSLSSTASALGKLQDVVNQNAQALNTLVKQLSSNFGAISSVLNDILSRLCPPEAEVQIDRLITGRLQSLQTYVTQQLIRAAEIRASANLAATKMSECVLGQSKRVDFCGKGYHLMSFPQSAPHGVVFLHVTYVPAQEKNFTTAPAICHDGKAHFPREGVFVSNGTHWFVTQRNFYEPQIITTDNTFVSGNCDVVIGIVNNTVYDPLQSELDSIKEELDKIHKNGSGGSGDIIKLLNEQVNKEMQSSNLYMSMSSWCYTHSLDGAGLFLFDHAAEEYEHAKKLIIFLNENNVPVQLTSISAPEHKFEGLTQIFQKAYEHEQHISESINNIVDHAIKSKDHATFNFLQWYVAEQHEEEVLFKDILDKIELIGNENHGLYLADQYVKGIAKSRKSGS

SEQ ID NO: 147 - protein, 1315 aa, Artificial Sequence
  Description of Artificial Sequence: Synthetic polypeptide
CVNLTTRTQLPPAYTNSFTRGVYYPDKVFRSSVLHSTQDLFLPFFSNVTWFHAIHVSGTNGTKRFDNPVLPFNDGVYFASTEKSNIIRGWIFGTTLDSKTQSLLIVNNATNVVIKVCEFQFCNDPFLGVYYHKNNKSWMESEFRVYSSANNCTFEYVSQPFLMDLEGKQGNFKNLREFVFKNIDGYFKIYSKHTPINLVRDLPQGFSALEPLVDLPIGINITRFQTLLALHRSYLTPGDSSSGWTAGAAAYYVGYLQPRTFLLKYNENGTITDAVDCALDPLSETKCTLKSFTVEKGIYQTSNFRVQPTESIVRFPNITNLCPFGEVFNATRFASVYAWNRKRISNCVADYSVLYNSASFSTFKCYGVSPTKLNDLCFTNVYADSFVIRGDEVRQIAPGQTGKIADYNYKLPDDFTGCVIAWNSNNLDSKVGGNYNYLYRLFRKSNLKPFERDISTEIYQAGSTPCNGVEGFNCYFPLQSYGFQPTNGVGYQPYRVVVLSFELLHAPATVCGPKKSTNLVKNKCVNFNFNGLTGTGVLTESNKKFLPFQQFGRDIADTTDAVRDPQTLEILDITPCSFGGVSVITPGTNTSNQVAVLYQDVNCTEVPVAIHADQLTPTWRVYSTGSNVFQTRAGCLIGAEHVNNSYECDIPIGAGICASYQTQTNSPGSASSVASQSIIAYTMSLGAENSVAYSNNSIAIPTNFTISVTTEILPVSMTKTSVDCTMYICGDSTECSNLLLQYGSFCTQLNRALTGIAVEQDKNTQEVFAQVKQIYKTPPIKDFGGFNFSQILPDPSKPSKRSFIEDLLFNKVTLADAGFIKQYGDCLGDIAARDLICAQKFNGLTVLPPLLTDEMIAQYTSALLAGTITSGWTFGAGAALQIPFAMQMAYRFNGIGVTQNVLYENQKLIANQFNSAIGKIQDSLSSTASALGKLQDVVNQNAQALNTLVKQLSSNFGAISSVLNDILSRLDPPEAEVQIDRLITGRLQSLQTYVTQQLIRAAEIRASANLAATKMSECVLGQSKRVDFCGKGYHLMSFPQSAPHGVVFLHVTYVPAQEKNFTTAPAICHDGKAHFPREGVFVSNGTHWFVTQRNFYEPQIITTDNTFVSGNCDVVIGIVNNTVYDPLQSELDSIKEELDKIHKNGSGGSGDIIKLLNEQVNKEMQSSNLYMSMSSWCYTHSLDGAGLFLFDHAAEEYEHAKKLIIFLNENNVPVQLTSISAPEHKFEGLTQIFQKAYEHEQHISESINNIVDHAIKSKDHATFNFLQWYVAEQHEEEVLFKDILDKIELIGNENHGLYLADQYVKGIAKSRKSGS

SEQ ID NO: 148 - protein, 1320 aa, Artificial Sequence
  Description of Artificial Sequence: Synthetic polypeptide
ETGTQCVNLTTRTQLPPAYTNSFTRGVYYPDKVFRSSVLHSTQDLFLPFFSNVTWFHAIHVSGTNGTKRFDNPVLPFNDGVYFASTEKSNIIRGWIFGTTLDSKTQSLLIVNNATNVVIKVCEFQFCNDPFLGVYYHKNNKSWMESEFRVYSSANNCTFEYVSQPFLMDLEGKQGNFKNLREFVFKNIDGYFKIYSKHTPINLVRDLPQGFSALEPLVDLPIGINITRFQTLLALHRSYLTPGDSSSGWTAGAAAYYVGYLQPRTFLLKYNENGTITDAVDCALDPLSETKCTLKSFTVEKGIYQTSNFRVQPTESIVRFPNITNLCPFGEVFNATRFASVYAWNRKRISNCVADYSVLYNSASFSTFKCYGVSPTKLNDLCFTNVYADSFVIRGDEVRQIAPGQTGKIADYNYKLPDDFTGCVIAWNSNNLDSKVGGNYNYLYRLFRKSNLKPFERDISTEIYQAGSTPCNGVEGFNCYFPLQSYGFQPTNGVGYQPYRVVVLSFELLHAPATVCGPKKSTNLVKNKCVNFNFNGLTGTGVLTESNKKFLPFQQFGRDIADTTDAVRDPQTLEILDITPCSFGGVSVITPGTNTSNQVAVLYQDVNCTEVPVAIHADQLTPTWRVYSTGSNVFQTRAGCLIGAEHVNNSYECDIPIGAGICASYQTQTNSPGSASSVASQSIIAYTMSLGAENSVAYSNNSIAIPTNFTISVTTEILPVSMTKTSVDCTMYICGDSTECSNLLLQYGSFCTQLNRALTGIAVEQDKNTQEVFAQVKQIYKTPPIKDFGGFNFSQILPDPSKPSKRSFIEDLLFNKVTLADAGFIKQYGDCLGDIAARDLICAQKFNGLTVLPPLLTDEMIAQYTSALLAGTITSGWTFGAGAALQIPFAMQMAYRFNGIGVTQNVLYENQKLIANQFNSAIGKIQDSLSSTASALGKLQDVVNQNAQALNTLVKQLSSNFGAISSVLNDILSRLDPPEAEVQIDRLITGRLQSLQTYVTQQLIRAAEIRASANLAATKMSECVLGQSKRVDFCGKGYHLMSFPQSAPHGVVFLHVTYVPAQEKNFTTAPAICHDGKAHFPREGVFVSNGTHWFVTQRNFYEPQIITTDNTFVSGNCDVVIGIVNNTVYDPLQSELDSIKEELDKIHKNGSGGSGDIIKLLNEQVNKEMQSSNLYMSMSSWCYTHSLDGAGLFLFDHAAEEYEHAKKLIIFLNENNVPVQLTSISAPEHKFEGLTQIFQKAYEHEQHISESINNIVDHAIKSKDHATFNFLQWYVAEQHEEEVLFKDILDKIELIGNENHGLYLADQYVKGIAKSRKSGS

SEQ ID NO: 149 - protein, 1320 aa, Artificial Sequence
  Description of Artificial Sequence: Synthetic polypeptide
SDLDRCVNLTTRTQLPPAYTNSFTRGVYYPDKVFRSSVLHSTQDLFLPFFSNVTWFHAIHVSGTNGTKRFDNPVLPFNDGVYFASTEKSNIIRGWIFGTTLDSKTQSLLIVNNATNVVIKVCEFQFCNDPFLGVYYHKNNKSWMESEFRVYSSANNCTFEYVSQPFLMDLEGKQGNFKNLREFVFKNIDGYFKIYSKHTPINLVRDLPQGFSALEPLVDLPIGINITRFQTLLALHRSYLTPGDSSSGWTAGAAAYYVGYLQPRTFLLKYNENGTITDAVDCALDPLSETKCTLKSFTVEKGIYQTSNFRVQPTESIVRFPNITNLCPFGEVFNATRFASVYAWNRKRISNCVADYSVLYNSASFSTFKCYGVSPTKLNDLCFTNVYADSFVIRGDEVRQIAPGQTGKIADYNYKLPDDFTGCVIAWNSNNLDSKVGGNYNYLYRLFRKSNLKPFERDISTEIYQAGSTPCNGVEGFNCYFPLQSYGFQPTNGVGYQPYRVVVLSFELLHAPATVCGPKKSTNLVKNKCVNFNFNGLTGTGVLTESNKKFLPFQQFGRDIADTTDAVRDPQTLEILDITPCSFGGVSVITPGTNTSNQVAVLYQDVNCTEVPVAIHADQLTPTWRVYSTGSNVFQTRAGCLIGAEHVNNSYECDIPIGAGICASYQTQTNSPGSASSVASQSIIAYTMSLGAENSVAYSNNSIAIPTNFTISVTTEILPVSMTKTSVDCTMYICGDSTECSNLLLQYGSFCTQLNRALTGIAVEQDKNTQEVFAQVKQIYKTPPIKDFGGFNFSQILPDPSKPSKRSFIEDLLFNKVTLADAGFIKQYGDCLGDIAARDLICAQKFNGLTVLPPLLTDEMIAQYTSALLAGTITSGWTFGAGAALQIPFAMQMAYRFNGIGVTQNVLYENQKLIANQFNSAIGKIQDSLSSTASALGKLQDVVNQNAQALNTLVKQLSSNFGAISSVLNDILSRLDPPEAEVQIDRLITGRLQSLQTYVTQQLIRAAEIRASANLAATKMSECVLGQSKRVDFCGKGYHLMSFPQSAPHGVVFLHVTYVPAQEKNFTTAPAICHDGKAHFPREGVFVSNGTHWFVTQRNFYEPQIITTDNTFVSGNCDVVIGIVNNTVYDPLQSELDSIKEELDKIHKNGSGGSGDIIKLLNEQVNKEMQSSNLYMSMSSWCYTHSLDGAGLFLFDHAAEEYEHAKKLIIFLNENNVPVQLTSISAPEHKFEGLTQIFQKAYEHEQHISESINNIVDHAIKSKDHATFNFLQWYVAEQHEEEVLFKDILDKIELIGNENHGLYLADQYVKGIAKSRKSGS

SEQ ID NO: 150 - protein, 1318 aa, Artificial Sequence
  Description of Artificial Sequence: Synthetic polypeptide
SSQCVNLTTRTQLPPAYTNSFTRGVYYPDKVFRSSVLHSTQDLFLPFFSNVTWFHAIHVSGTNGTKRFDNPVLPFNDGVYFASTEKSNIIRGWIFGTTLDSKTQSLLIVNNATNVVIKVCEFQFCNDPFLGVYYHKNNKSWMESEFRVYSSANNCTFEYVSQPFLMDLEGKQGNFKNLREFVFKNIDGYFKIYSKHTPINLVRDLPQGFSALEPLVDLPIGINITRFQTLLALHRSYLTPGDSSSGWTAGAAAYYVGYLQPRTFLLKYNENGTITDAVDCALDPLSETKCTLKSFTVEKGIYQTSNFRVQPTESIVRFPNITNLCPFGEVFNATRFASVYAWNRKRISNCVADYSVLYNSASFSTFKCYGVSPTKLNDLCFTNVYADSFVIRGDEVRQIAPGQTGKIADYNYKLPDDFTGCVIAWNSNNLDSKVGGNYNYLYRLFRKSNLKPFERDISTEIYQAGSTPCNGVEGFNCYFPLQSYGFQPTNGVGYQPYRVVVLSFELLHAPATVCGPKKSTNLVKNKCVNFNFNGLTGTGVLTESNKKFLPFQQFGRDIADTTDAVRDPQTLEILDITPCSFGGVSVITPGTNTSNQVAVLYQDVNCTEVPVAIHADQLTPTWRVYSTGSNVFQTRAGCLIGAEHVNNSYECDIPIGAGICASYQTQTNSPGSASSVASQSIIAYTMSLGAENSVAYSNNSIAIPTNFTISVTTEILPVSMTKTSVDCTMYICGDSTECSNLLLQYGSFCTQLNRALTGIAVEQDKNTQEVFAQVKQIYKTPPIKDFGGFNFSQILPDPSKPSKRSFIEDLLFNKVTLADAGFIKQYGDCLGDIAARDLICAQKFNGLTVLPPLLTDEMIAQYTSALLAGTITSGWTFGAGAALQIPFAMQMAYRFNGIGVTQNVLYENQKLIANQFNSAIGKIQDSLSSTASALGKLQDVVNQNAQALNTLVKQLSSNFGAISSVLNDILSRLDPPEAEVQIDRLITGRLQSLQTYVTQQLIRAAEIRASANLAATKMSECVLGQSKRVDFCGKGYHLMSFPQSAPHGVVFLHVTYVPAQEKNFTTAPAICHDGKAHFPREGVFVSNGTHWFVTQRNFYEPQIITTDNTFVSGNCDVVIGIVNNTVYDPLQPELDSFKEELDKYFKNGSGGSGDIIKLLNEQVNKEMQSSNLYMSMSSWCYTHSLDGAGLFLFDHAAEEYEHAKKLIIFLNENNVPVQLTSISAPEHKFEGLTQIFQKAYEHEQHISESINNIVDHAIKSKDHATFNFLQWYVAEQHEEEVLFKDILDKIELIGNENHGLYLADQYVKGIAKSRKSGS

SEQ ID NO: 151 - protein, 1318 aa, Artificial Sequence
  Description of Artificial Sequence: Synthetic polypeptide
SSQCVNLTTRTQLPPAYTNSFTRGVYYPDKVFRSSVLHSTQDLFLPFFSNVTWFHAIHVSGTNGTKRFDNPVLPFNDGVYFASTEKSNIIRGWIFGTTLDSKTQSLLIVNNATNVVIKVCEFQFCNDPFLGVYYHKNNKSWMESEFRVYSSANNCTFEYVSQPFLMDLEGKQGNFKNLREFVFKNIDGYFKIYSKHTPINLVRDLPQGFSALEPLVDLPIGINITRFQTLLALHRSYLTPGDSSSGWTAGAAAYYVGYLQPRTFLLKYNENGTITDAVDCALDPLSETKCTLKSFTVEKGIYQTSNFRVQPTESIVRFPNITNLCPFGEVFNATRFASVYAWNRKRISNCVADYSVLYNSASFSTFKCYGVSPTKLNDLCFTNVYADSFVIRGDEVRQIAPGQTGKIADYNYKLPDDFTGCVIAWNSNNLDSKVGGNYNYLYRLFRKSNLKPFERDISTEIYQAGSTPCNGVEGFNCYFPLQSYGFQPTNGVGYQPYRVVVLSFELLHAPATVCGPKKSTNLVKNKCVNFNFNGLTGTGVLTESNKKFLPFQQFGRDIADTTDAVRDPQTLEILDITPCSFGGVSVITPGTNTSNQVAVLYQDVNCTEVPVAIHADQLTPTWRVYSTGSNVFQTRAGCLIGAEHVNNSYECDIPIGAGICASYQTQTNSPGSASSVASQSIIAYTMSLGAENSVAYSNNSIAIPTNFTISVTTEILPVSMTKTSVDCTMYICGDSTECSNLLLQYGSFCTQLNRALTGIAVEQDKNTQEVFAQVKQIYKTPPIKDFGGFNFSQILPDPSKPSKRSFIEDLLFNKVTLADAGFIKQYGDCLGDIAARDLICAQKFNGLTVLPPLLTDEMIAQYTSALLAGTITSGWTFGAGAALQIPFAMQMAYRFNGIGVTQNVLYENQKLIANQFNSAIGKIQDSLSSTASALGKLQDVVNQNAQALNTLVKQLSSNFGAISSVLNDILSRLDPPEAEVQIDRLITGRLQSLQTYVTQQLIRAAEIRASANLAATKMSECVLGQSKRVDFCGKGYHLMSFPQSAPHGVVFLHVTYVPAQEKNFTTAPAICHDGKAHFPREGVFVSNGTHWFVTQRNFYEPQIITTDNTFVSGNCDVVIGIVNNTVYDPLQPELDSIKEELDKYFKNGSGGSGDIIKLLNEQVNKEMQSSNLYMSMSSWCYTHSLDGAGLFLFDHAAEEYEHAKKLIIFLNENNVPVQLTSISAPEHKFEGLTQIFQKAYEHEQHISESINNIVDHAIKSKDHATFNFLQWYVAEQHEEEVLFKDILDKIELIGNENHGLYLADQYVKGIAKSRKSGS

SEQ ID NO: 152 - protein, 1318 aa, Artificial Sequence
  Description of Artificial Sequence: Synthetic polypeptide
SSQCVNLTTRTQLPPAYTNSFTRGVYYPDKVFRSSVLHSTQDLFLPFFSNVTWFHAIHVSGTNGTKRFDNPVLPFNDGVYFASTEKSNIIRGWIFGTTLDSKTQSLLIVNNATNVVIKVCEFQFCNDPFLGVYYHKNNKSWMESEFRVYSSANNCTFEYVSQPFLMDLEGKQGNFKNLREFVFKNIDGYFKIYSKHTPINLVRDLPQGFSALEPLVDLPIGINITRFQTLLALHRSYLTPGDSSSGWTAGAAAYYVGYLQPRTFLLKYNENGTITDAVDCALDPLSETKCTLKSFTVEKGIYQTSNFRVQPTESIVRFPNITNLCPFGEVFNATRFASVYAWNRKRISNCVADYSVLYNSASFSTFKCYGVSPTKLNDLCFTNVYADSFVIRGDEVRQIAPGQTGKIADYNYKLPDDFTGCVIAWNSNNLDSKVGGNYNYLYRLFRKSNLKPFERDISTEIYQAGSTPCNGVEGFNCYFPLQSYGFQPTNGVGYQPYRVVVLSFELLHAPATVCGPKKSTNLVKNKCVNFNFNGLTGTGVLTESNKKFLPFQQFGRDIADTTDAVRDPQTLEILDITPCSFGGVSVITPGTNTSNQVAVLYQDVNCTEVPVAIHADQLTPTWRVYSTGSNVFQTRAGCLIGAEHVNNSYECDIPIGAGICASYQTQTNSPGSASSVASQSIIAYTMSLGAENSVAYSNNSIAIPTNFTISVTTEILPVSMTKTSVDCTMYICGDSTECSNLLLQYGSFCTQLNRALTGIAVEQDKNTQEVFAQVKQIYKTPPIKDFGGFNFSQILPDPSKPSKRSFIEDLLFNKVTLADAGFIKQYGDCLGDIAARDLICAQKFNGLTVLPPLLTDEMIAQYTSALLAGTITSGWTFGAGAALQIPFAMQMAYRFNGIGVTQNVLYENQKLIANQFNSAIGKIQDSLSSTASALGKLQDVVNQNAQALNTLVKQLSSNFGAISSVLNDILSRLDPPEAEVQIDRLITGRLQSLQTYVTQQLIRAAEIRASANLAATKMSECVLGQSKRVDFCGKGYHLMSFPQSAPHGVVFLHVTYVPAQEKNFTTAPAICHDGKAHFPREGVFVSNGTHWFVTQRNFYEPQIITTDNTFVSGNCDVVIGIVNNTVYDPLQPELDSIKEELDKIHKNGSGGSGDIIKLLNEQVNKEMQSSNLYMSMSSWCYTHSLDGAGLFLFDHAAEEYEHAKKLIIFLNENNVPVQLTSISAPEHKFEGLTQIFQKAYEHEQHISESINNIVDHAIKSKDHATFNFLQWYVAEQHEEEVLFKDILDKIELIGNENHGLYLADQYVKGIAKSRKSGS

SEQ ID NO: 153 - protein, 1317 aa, Artificial Sequence
  Description of Artificial Sequence: Synthetic polypeptide
SSQCVNLTTRTQLPPAYTNSFTRGVYYPDKVFRSSVLHSTQDLFLPFFSNVTWFHAIHVSGTNGTKRFDNPVLPFNDGVYFASTEKSNIIRGWIFGTTLDSKTQSLLIVNNATNVVIKVCEFQFCNDPFLGVYYHKNNKSWMESEFRVYSSANNCTFEYVSQPFLMDLEGKQGNFKNLREFVFKNIDGYFKIYSKHTPINLVRDLPQGFSALEPLVDLPIGINITRFQTLLALHRSYLTPGDSSSGWTAGAAAYYVGYLQPRTFLLKYNENGTITDAVDCALDPLSETKCTLKSFTVEKGIYQTSNFRVQPTESIVRFPNITNLCPFGEVFNATRFASVYAWNRKRISNCVADYSVLYNSASFSTFKCYGVSPTKLNDLCFTNVYADSFVIRGDEVRQIAPGQTGKIADYNYKLPDDFTGCVIAWNSNNLDSKVGGNYNYLYRLFRKSNLKPFERDISTEIYQAGSTPCNGVEGFNCYFPLQSYGFQPTNGVGYQPYRVVVLSFELLHAPATVCGPKKSTNLVKNKCVNFNFNGLTGTGVLTESNKKFLPFQQFGRDIADTTDAVRDPQTLEILDITPCSFGGVSVITPGTNTSNQVAVLYQDVNCTEVPVAIHADQLTPTWRVYSTGSNVFQTRAGCLIGAEHVNNSYECDIPIGAGICASYQTQTNSPGSASSVASQSIIAYTMSLGAENSVAYSNNSIAIPTNFTISVTTEILPVSMTKTSVDCTMYICGDSTECSNLLLQYGSFCTQLNRALTGIAVEQDKNTQEVFAQVKQIYKTPPIKDFGGFNFSQILPDPSKPSKRSFIEDLLFNKVTLADAGFIKQYGDCLGDIAARDLICAQKFNGLTVLPPLLTDEMIAQYTSALLAGTITSGWTFGAGAALQIPFAMQMAYRFNGIGVTQNVLYENQKLIANQFNSAIGKIQDSLSSTASALGKLQDVVNQNAQALNTLVKQLSSNFGAISSVLNDILSRLDPPEAEVQIDRLITGRLQSLQTYVTQQLIRAAEIRASANLAATKMSECVLGQSKRVDFCGKGYHLMSFPQSAPHGVVFLHVTYVPAQEKNFTTAPAICHDGKAHFPREGVFVSNGTHWFVTQRNFYEPQIITTDNTFVSGNCDVVIGIVNNTVYDPLQPELDSFKEELDKYFKGSGGSGDIIKLLNEQVNKEMQSSNLYMSMSSWCYTHSLDGAGLFLFDHAAEEYEHAKKLIIFLNENNVPVQLTSISAPEHKFEGLTQIFQKAYEHEQHISESINNIVDHAIKSKDHATFNFLQWYVAEQHEEEVLFKDILDKIELIGNENHGLYLADQYVKGIAKSRKSGS

SEQ ID NO: 154 - protein, 1319 aa, Artificial Sequence
  Description of Artificial Sequence: Synthetic polypeptide
SSQCVNLTTRTQLPPAYTNSFTRGVYYPDKVFRSSVLHSTQDLFLPFFSNVTWFHAIHVSGTNGTKRFDNPVLPFNDGVYFASTEKSNIIRGWIFGTTLDSKTQSLLIVNNATNVVIKVCEFQFCNDPFLGVYYHKNNKSWMESEFRVYSSANNCTFEYVSQPFLMDLEGKQGNFKNLREFVFKNIDGYFKIYSKHTPINLVRDLPQGFSALEPLVDLPIGINITRFQTLLALHRSYLTPGDSSSGWTAGAAAYYVGYLQPRTFLLKYNENGTITDAVDCALDPLSETKCTLKSFTVEKGIYQTSNFRVQPTESIVRFPNITNLCPFGEVFNATRFASVYAWNRKRISNCVADYSVLYNSASFSTFKCYGVSPTKLNDLCFTNVYADSFVIRGDEVRQIAPGQTGKIADYNYKLPDDFTGCVIAWNSNNLDSKVGGNYNYLYRLFRKSNLKPFERDISTEIYQAGSTPCNGVEGFNCYFPLQSYGFQPTNGVGYQPYRVVVLSFELLHAPATVCGPKKSTNLVKNKCVNFNFNGLTGTGVLTESNKKFLPFQQFGRDIADTTDAVRDPQTLEILDITPCSFGGVSVITPGTNTSNQVAVLYQDVNCTEVPVAIHADQLTPTWRVYSTGSNVFQTRAGCLIGAEHVNNSYECDIPIGAGICASYQTQTNSPGSASSVASQSIIAYTMSLGAENSVAYSNNSIAIPTNFTISVTTEILPVSMTKTSVDCTMYICGDSTECSNLLLQYGSFCTQLNRALTGIAVEQDKNTQEVFAQVKQIYKTPPIKDFGGFNFSQILPDPSKPSKRSFIEDLLFNKVTLADAGFIKQYGDCLGDIAARDLICAQKFNGLTVLPPLLTDEMIAQYTSALLAGTITSGWTFGAGAALQIPFAMQMAYRFNGIGVTQNVLYENQKLIANQFNSAIGKIQDSLSSTASALGKLQDVVNQNAQALNTLVKQLSSNFGAISSVLNDILSRLDPPEAEVQIDRLITGRLQSLQTYVTQQLIRAAEIRASANLAATKMSECVLGQSKRVDFCGKGYHLMSFPQSAPHGVVFLHVTYVPAQEKNFTTAPAICHDGKAHFPREGVFVSNGTHWFVTQRNFYEPQIITTDNTFVSGNCDVVIGIVNNTVYDPLQPELDSFKEELDKYFKNHGSGGSGDIIKLLNEQVNKEMQSSNLYMSMSSWCYTHSLDGAGLFLFDHAAEEYEHAKKLIIFLNENNVPVQLTSISAPEHKFEGLTQIFQKAYEHEQHISESINNIVDHAIKSKDHATFNFLQWYVAEQHEEEVLFKDILDKIELIGNENHGLYLADQYVKGIAKSRKSGS

SEQ ID NO: 155 - protein, 1320 aa, Artificial Sequence
  Description of Artificial Sequence: Synthetic polypeptide
SSQCVNLTTRTQLPPAYTNSFTRGVYYPDKVFRSSVLHSTQDLFLPFFSNVTWFHAIHVSGTNGTKRFDNPVLPFNDGVYFASTEKSNIIRGWIFGTTLDSKTQSLLIVNNATNVVIKVCEFQFCNDPFLGVYYHKNNKSWMESEFRVYSSANNCTFEYVSQPFLMDLEGKQGNFKNLREFVFKNIDGYFKIYSKHTPINLVRDLPQGFSALEPLVDLPIGINITRFQTLLALHRSYLTPGDSSSGWTAGAAAYYVGYLQPRTFLLKYNENGTITDAVDCALDPLSETKCTLKSFTVEKGIYQTSNFRVQPTESIVRFPNITNLCPFGEVFNATRFASVYAWNRKRISNCVADYSVLYNSASFSTFKCYGVSPTKLNDLCFTNVYADSFVIRGDEVRQIAPGQTGKIADYNYKLPDDFTGCVIAWNSNNLDSKVGGNYNYLYRLFRKSNLKPFERDISTEIYQAGSTPCNGVEGFNCYFPLQSYGFQPTNGVGYQPYRVVVLSFELLHAPATVCGPKKSTNLVKNKCVNFNFNGLTGTGVLTESNKKFLPFQQFGRDIADTTDAVRDPQTLEILDITPCSFGGVSVITPGTNTSNQVAVLYQDVNCTEVPVAIHADQLTPTWRVYSTGSNVFQTRAGCLIGAEHVNNSYECDIPIGAGICASYQTQTNSPGSASSVASQSIIAYTMSLGAENSVAYSNNSIAIPTNFTISVTTEILPVSMTKTSVDCTMYICGDSTECSNLLLQYGSFCTQLNRALTGIAVEQDKNTQEVFAQVKQIYKTPPIKDFGGFNFSQILPDPSKPSKRSFIEDLLFNKVTLADAGFIKQYGDCLGDIAARDLICAQKFNGLTVLPPLLTDEMIAQYTSALLAGTITSGWTFGAGAALQIPFAMQMAYRFNGIGVTQNVLYENQKLIANQFNSAIGKIQDSLSSTASALGKLQDVVNQNAQALNTLVKQLSSNFGAISSVLNDILSRLDPPEAEVQIDRLITGRLQSLQTYVTQQLIRAAEIRASANLAATKMSECVLGQSKRVDFCGKGYHLMSFPQSAPHGVVFLHVTYVPAQEKNFTTAPAICHDGKAHFPREGVFVSNGTHWFVTQRNFYEPQIITTDNTFVSGNCDVVIGIVNNTVYDPLQPELDSFKEELDKYFKNHTGSGGSGDIIKLLNEQVNKEMQSSNLYMSMSSWCYTHSLDGAGLFLFDHAAEEYEHAKKLIIFLNENNVPVQLTSISAPEHKFEGLTQIFQKAYEHEQHISESINNIVDHAIKSKDHATFNFLQWYVAEQHEEEVLFKDILDKIELIGNENHGLYLADQYVKGIAKSRKSGS

SEQ ID NO: 156 - protein, 1317 aa, Artificial Sequence
  Description of Artificial Sequence: Synthetic polypeptide
SSQCVNLTTRTQLPPAYTNSFTRGVYYPDKVFRSSVLHSTQDLFLPFFSNVTWFHAIHVSGTNGTKRFDNPVLPFNDGVYFASTEKSNIIRGWIFGTTLDSKTQSLLIVNNATNVVIKVCEFQFCNDPFLGVYYHKNNKSWMESEFRVYSSANNCTFEYVSQPFLMDLEGKQGNFKNLREFVFKNIDGYFKIYSKHTPINLVRDLPQGFSALEPLVDLPIGINITRFQTLLALHRSYLTPGDSSSGWTAGAAAYYVGYLQPRTFLLKYNENGTITDAVDCALDPLSETKCTLKSFTVEKGIYQTSNFRVQPTESIVRFPNITNLCPFGEVFNATRFASVYAWNRKRISNCVADYSVLYNSASFSTFKCYGVSPTKLNDLCFTNVYADSFVIRGDEVRQIAPGQTGKIADYNYKLPDDFTGCVIAWNSNNLDSKVGGNYNYLYRLFRKSNLKPFERDISTEIYQAGSTPCNGVEGFNCYFPLQSYGFQPTNGVGYQPYRVVVLSFELLHAPATVCGPKKSTNLVKNKCVNFNFNGLTGTGVLTESNKKFLPFQQFGRDIADTTDAVRDPQTLEILDITPCSFGGVSVITPGTNTSNQVAVLYQDVNCTEVPVAIHADQLTPTWRVYSTGSNVFQTRAGCLIGAEHVNNSYECDIPIGAGICASYQTQTNSPGSASSVASQSIIAYTMSLGAENSVAYSNNSIAIPTNFTISVTTEILPVSMTKTSVDCTMYICGDSTECSNLLLQYGSFCTQLNRALTGIAVEQDKNTQEVFAQVKQIYKTPPIKDFGGFNFSQILPDPSKPSKRSFIEDLLFNKVTLADAGFIKQYGDCLGDIAARDLICAQKFNGLTVLPPLLTDEMIAQYTSALLAGTITSGWTFGAGAALQIPFAMQMAYRFNGIGVTQNVLYENQKLIANQFNSAIGKIQDSLSSTASALGKLQDVVNQNAQALNTLVKQLSSNFGAISSVLNDILSRLDPPEAEVQIDRLITGRLQSLQTYVTQQLIRAAEIRASANLAATKMSECVLGQSKRVDFCGKGYHLMSFPQSAPHGVVFLHVTYVPAQEKNFTTAPAICHDGKAHFPREGVFVSNGTHWFVTQRNFYEPQIITTDNTFVSGNCDVVIGIVNNTVYDPLQPELDSIKEELDKIHKGSGGSGDIIKLLNEQVNKEMQSSNLYMSMSSWCYTHSLDGAGLFLFDHAAEEYEHAKKLIIFLNENNVPVQLTSISAPEHKFEGLTQIFQKAYEHEQHISESINNIVDHAIKSKDHATFNFLQWYVAEQHEEEVLFKDILDKIELIGNENHGLYLADQYVKGIAKSRKSGS

SEQ ID NO: 157 - protein, 1319 aa, Artificial Sequence
  Description of Artificial Sequence: Synthetic polypeptide
SSQCVNLTTRTQLPPAYTNSFTRGVYYPDKVFRSSVLHSTQDLFLPFFSNVTWFHAIHVSGTNGTKRFDNPVLPFNDGVYFASTEKSNIIRGWIFGTTLDSKTQSLLIVNNATNVVIKVCEFQFCNDPFLGVYYHKNNKSWMESEFRVYSSANNCTFEYVSQPFLMDLEGKQGNFKNLREFVFKNIDGYFKIYSKHTPINLVRDLPQGFSALEPLVDLPIGINITRFQTLLALHRSYLTPGDSSSGWTAGAAAYYVGYLQPRTFLLKYNENGTITDAVDCALDPLSETKCTLKSFTVEKGIYQTSNFRVQPTESIVRFPNITNLCPFGEVFNATRFASVYAWNRKRISNCVADYSVLYNSASFSTFKCYGVSPTKLNDLCFTNVYADSFVIRGDEVRQIAPGQTGKIADYNYKLPDDFTGCVIAWNSNNLDSKVGGNYNYLYRLFRKSNLKPFERDISTEIYQAGSTPCNGVEGFNCYFPLQSYGFQPTNGVGYQPYRVVVLSFELLHAPATVCGPKKSTNLVKNKCVNFNFNGLTGTGVLTESNKKFLPFQQFGRDIADTTDAVRDPQTLEILDITPCSFGGVSVITPGTNTSNQVAVLYQDVNCTEVPVAIHADQLTPTWRVYSTGSNVFQTRAGCLIGAEHVNNSYECDIPIGAGICASYQTQTNSPGSASSVASQSIIAYTMSLGAENSVAYSNNSIAIPTNFTISVTTEILPVSMTKTSVDCTMYICGDSTECSNLLLQYGSFCTQLNRALTGIAVEQDKNTQEVFAQVKQIYKTPPIKDFGGFNFSQILPDPSKPSKRSFIEDLLFNKVTLADAGFIKQYGDCLGDIAARDLICAQKFNGLTVLPPLLTDEMIAQYTSALLAGTITSGWTFGAGAALQIPFAMQMAYRFNGIGVTQNVLYENQKLIANQFNSAIGKIQDSLSSTASALGKLQDVVNQNAQALNTLVKQLSSNFGAISSVLNDILSRLDPPEAEVQIDRLITGRLQSLQTYVTQQLIRAAEIRASANLAATKMSECVLGQSKRVDFCGKGYHLMSFPQSAPHGVVFLHVTYVPAQEKNFTTAPAICHDGKAHFPREGVFVSNGTHWFVTQRNFYEPQIITTDNTFVSGNCDVVIGIVNNTVYDPLQPELDSIKEELDKIHKNHGSGGSGDIIKLLNEQVNKEMQSSNLYMSMSSWCYTHSLDGAGLFLFDHAAEEYEHAKKLIIFLNENNVPVQLTSISAPEHKFEGLTQIFQKAYEHEQHISESINNIVDHAIKSKDHATFNFLQWYVAEQHEEEVLFKDILDKIELIGNENHGLYLADQYVKGIAKSRKSGS

SEQ ID NO: 158 - protein, 1320 aa, Artificial Sequence
  Description of Artificial Sequence: Synthetic polypeptide
SSQCVNLTTRTQLPPAYTNSFTRGVYYPDKVFRSSVLHSTQDLFLPFFSNVTWFHAIHVSGTNGTKRFDNPVLPFNDGVYFASTEKSNIIRGWIFGTTLDSKTQSLLIVNNATNVVIKVCEFQFCNDPFLGVYYHKNNKSWMESEFRVYSSANNCTFEYVSQPFLMDLEGKQGNFKNLREFVFKNIDGYFKIYSKHTPINLVRDLPQGFSALEPLVDLPIGINITRFQTLLALHRSYLTPGDSSSGWTAGAAAYYVGYLQPRTFLLKYNENGTITDAVDCALDPLSETKCTLKSFTVEKGIYQTSNFRVQPTESIVRFPNITNLCPFGEVFNATRFASVYAWNRKRISNCVADYSVLYNSASFSTFKCYGVSPTKLNDLCFTNVYADSFVIRGDEVRQIAPGQTGKIADYNYKLPDDFTGCVIAWNSNNLDSKVGGNYNYLYRLFRKSNLKPFERDISTEIYQAGSTPCNGVEGFNCYFPLQSYGFQPTNGVGYQPYRVVVLSFELLHAPATVCGPKKSTNLVKNKCVNFNFNGLTGTGVLTESNKKFLPFQQFGRDIADTTDAVRDPQTLEILDITPCSFGGVSVITPGTNTSNQVAVLYQDVNCTEVPVAIHADQLTPTWRVYSTGSNVFQTRAGCLIGAEHVNNSYECDIPIGAGICASYQTQTNSPGSASSVASQSIIAYTMSLGAENSVAYSNNSIAIPTNFTISVTTEILPVSMTKTSVDCTMYICGDSTECSNLLLQYGSFCTQLNRALTGIAVEQDKNTQEVFAQVKQIYKTPPIKDFGGFNFSQILPDPSKPSKRSFIEDLLFNKVTLADAGFIKQYGDCLGDIAARDLICAQKFNGLTVLPPLLTDEMIAQYTSALLAGTITSGWTFGAGAALQIPFAMQMAYRFNGIGVTQNVLYENQKLIANQFNSAIGKIQDSLSSTASALGKLQDVVNQNAQALNTLVKQLSSNFGAISSVLNDILSRLDPPEAEVQIDRLITGRLQSLQTYVTQQLIRAAEIRASANLAATKMSECVLGQSKRVDFCGKGYHLMSFPQSAPHGVVFLHVTYVPAQEKNFTTAPAICHDGKAHFPREGVFVSNGTHWFVTQRNFYEPQIITTDNTFVSGNCDVVIGIVNNTVYDPLQPELDSIKEELDKIHKNHTGSGGSGDIIKLLNEQVNKEMQSSNLYMSMSSWCYTHSLDGAGLFLFDHAAEEYEHAKKLIIFLNENNVPVQLTSISAPEHKFEGLTQIFQKAYEHEQHISESINNIVDHAIKSKDHATFNFLQWYVAEQHEEEVLFKDILDKIELIGNENHGLYLADQYVKGIAKSRKSGS

SEQ ID NO: 159 - protein, 1310 aa, Artificial Sequence
  Description of Artificial Sequence: Synthetic polypeptide
VNLTTRTQLPPAYTNSFTRGVYYPDKVFRSSVLHSTQDLFLPFFSNVTWFHAIHVSGTNGTKRFDNPVLPFNDGVYFASTEKSNIIRGWIFGTTLDSKTQSLLIVNNATNVVIKVCEFQFCNDPFLGVYYHKNNKSWMESEFRVYSSANNCTFEYVSQPFLMDLEGKQGNFKNLREFVFKNIDGYFKIYSKHTPINLVRDLPQGFSALEPLVDLPIGINITRFQTLLALHRSYLTPGDSSSGWTAGAAAYYVGYLQPRTFLLKYNENGTITDAVDCALDPLSETKCTLKSFTVEKGIYQTSNFRVQPTESIVRFPNITNLCPFGEVFNATRFASVYAWNRKRISNCVADYSVLYNSASFSTFKCYGVSPTKLNDLCFTNVYADSFVIRGDEVRQIAPGQTGKIADYNYKLPDDFTGCVIAWNSNNLDSKVGGNYNYLYRLFRKSNLKPFERDISTEIYQAGSTPCNGVEGFNCYFPLQSYGFQPTNGVGYQPYRVVVLSFELLHAPATVCGPKKSTNLVKNKCVNFNFNGLTGTGVLTESNKKFLPFQQFGRDIADTTDAVRDPQTLEILDITPCSFGGVSVITPGTNTSNQVAVLYQDVNCTEVPVAIHADQLTPTWRVYSTGSNVFQTRAGCLIGAEHVNNSYECDIPIGAGICASYQTQTNSPGSASSVASQSIIAYTMSLGAENSVAYSNNTIAIPTNFTISVTTEILPVSMTKTSVDCTMYICGDSTECSNLLLQYGSFCTQLNRALTGIAVEQDKNTQEVFAQVKQIYKTPPIKDFGGFNFSQILPDPSKPSKRSFIEDLLFNKVTLADAGFIKQYGDCLGDIAARDLICAQKFNGLTVLPPLLTDEMIAQYTSALLAGTITSGWTFGAGAALQIPFAMQMAYRFNGIGVTQNVLYENQKLIANQFNSAIGKIQDSLSSTASALGKLQDVVNQNAQALNTLVKQLSSNFGAISSVLNDILSRLDPPEAEVQIDRLITGRLQSLQTYVTQQLIRAAEIRASANLAATKMSECVLGQSKRVDFCGKGYHLMSFPQSAPHGVVFLHVTYVPAQEKNFTTAPAICHDGKAHFPREGVFVSNGTHWFVTQRNFYEPQIITTDNTFVSGNCDVVIGIVNNTVYDPLQPELDSFKEELDKGSGGSGDIIKLLNEQVNKEMQSSNLYMSMSSWCYTHSLDGAGLFLFDHAAEEYEHAKKLIIFLNENNVPVQLTSISAPEHKFEGLTQIFQKAYEHEQHISESINNIVDHAIKSKDHATFNFLQWYVAEQHEEEVLFKDILDKIELIGNENHGLYLADQYVKGIAKSRKSGS

SEQ ID NO: 160 - protein, 1318 aa, Artificial Sequence
  Description of Artificial Sequence: Synthetic polypeptide
SSQCVNLTTRTQLPPAYTNSFTRGVYYPDKVFRSSVLHSTQDLFLPFFSNVTWFHAIHVSGTNGTKRFDNPVLPFNDGVYFASTEKSNIIRGWIFGTTLDSKTQSLLIVNNATNVVIKVCEFQFCNDPFLGVYYHKNNKSWMESEFRVYSSANNCTFEYVSQPFLMDLEGKQGNFKNLREFVFKNIDGYFKIYSKHTPINLVRDLPQGFSALEPLVDLPIGINITRFQTLLALHRSYLTPGDSSSGWTAGAAAYYVGYLQPRTFLLKYNENGTITDAVDCALDPLSETKCTLKSFTVEKGIYQTSNFRVQPTESIVRFPNITNLCPFGEVFNATRFASVYAWNRKRISNCVADYSVLYNSASFSTFKCYGVSPTKLNDLCFTNVYADSFVIRGDEVRQIAPGQTGKIADYNYKLPDDFTGCVIAWNSNNLDSKVGGNYNYLYRLFRKSNLKPFERDISTEIYQAGSTPCNGVEGFNCYFPLQSYGFQPTNGVGYQPYRVVVLSFELLHAPATVCGPKKSTNLVKNKCVNFNFNGLTGTGVLTESNKKFLPFQQFGRDIADTTDAVRDPQTLEILDITPCSFGGVSVITPGTNTSNQVAVLYQDVNCTEVPVAIHADQLTPTWRVYSTGSNVFQTRAGCLIGAEHVNNSYECDIPIGAGICASYQTQTNSPGSASSVASQSIIAYTMSLGAENSVAYSNNTIAIPTNFTISVTTEILPVSMTKTSVDCTMYICGDSTECSNLLLQYGSFCTQLNRALTGIAVEQDKNTQEVFAQVKQIYKTPPIKDFGGFNFSQILPDPSKPSKRSFIEDLLFNKVTLADAGFIKQYGDCLGDIAARDLICAQKFNGLTVLPPLLTDEMIAQYTSALLAGTITSGWTFGAGAALQIPFAMQMAYRFNGIGVTQNVLYENQKLIANQFNSAIGKIQDSLSSTASALGKLQDVVNQNAQALNTLVKQLSSNFGAISSVLNDILSRLDPPEAEVQIDRLITGRLQSLQTYVTQQLIRAAEIRASANLAATKMSECVLGQSKRVDFCGKGYHLMSFPQSAPHGVVFLHVTYVPAQEKNFTTAPAICHDGKAHFPREGVFVSNGTHWFVTQRNFYEPQIITTDNTFVSGNCDVVIGIVNNTVYDPLQSELDSIKEELDKIHKNGSGGSGDIIKLLNEQVNKEMQSSNLYMSMSSWCYTHSLDGAGLFLFDHAAEEYEHAKKLIIFLNENNVPVQLTSISAPEHKFEGLTQIFQKAYEHEQHISESINNIVDHAIKSKDHATFNFLQWYVAEQHEEEVLFKDILDKIELIGNENHGLYLADQYVKGIAKSRKSGS

SEQ ID NO: 161 - protein, 1310 aa, Artificial Sequence
  Description of Artificial Sequence: Synthetic polypeptide
VNLTTRTQLPPAYTNSFTRGVYYPDKVFRSSVLHSTQDLFLPFFSNVTWFHAIHVSGTNGTKRFDNPVLPFNDGVYFASTEKSNIIRGWIFGTTLDSKTQSLLIVNNATNVVIKVCEFQFCNDPFLGVYYHKNNKSWMESEFRVYSSANNCTFEYVSQPFLMDLEGKQGNFKNLREFVFKNIDGYFKIYSKHTPINLVRDLPQGFSALEPLVDLPIGINITRFQTLLALHRSYLTPGDSSSGWTAGAAAYYVGYLQPRTFLLKYNENGTITDAVDCALDPLSETKCTLKSFTVEKGIYQTSNFRVQPTESIVRFPNITNLCPFGEVFNATRFASVYAWNRKRISNCVADYSVLYNSASFSTFKCYGVSPTKLNDLCFTNVYADSFVIRGDEVRQIAPGQTGKIADYNYKLPDDFTGCVIAWNSNNLDSKVGGNYNYLYRLFRKSNLKPFERDISTEIYQAGSTPCNGVEGFNCYFPLQSYGFQPTNGVGYQPYRVVVLSFELLHAPATVCGPKKSTNLVKNKCVNFNFNGLTGTGVLTESNKKFLPFQQFGRDIADTTDAVRDPQTLEILDITPCSFGGVSVITPGTNTSNQVAVLYQDVNCTEVPVAIHADQLTPTWRVYSTGSNVFQTRAGCLIGAEHVNNSYECDIPIGAGICASYQTQTNSPGSASSVASQSIIAYTMSLGAENSVAYSNNSIAIPTNFTISVTTEILPVSMTKTSVDCTMYICGDSTECSNLLLQYGSFCTQLNRALTGIAVEQDKCTQEVFAQVKQIYKTPPIKDFGGFNFSQILPDPSKPSKRSFIEDLLFNKVTLADAGFIKQYGDCLGDIAARDLICAQKFNGLTVLPPLLTDEMIAQYTSALLAGTITSGWTFGAGAALQIPFAMQMAYRFNGIGVTQNVLYENQKLIANQFNSAIGKIQDSLSSTASALGKLQDVVNQNAQALNTLVKQLSSNFGAISSVLNDILSRLDPPEAEVQIDRLITGRLQSLQTYVTQQLIRAAEIRASCNLAATKMSECVLGQSKRVDFCGKGYHLMSFPQSAPHGVVFLHVTYVPAQEKNFTTAPAICHDGKAHFPREGVFVSNGTHWFVTQRNFYEPQIITTDNTFVSGNCDVVIGIVNNTVYDPLQPELDSFKEELDKGSGGSGDIIKLLNEQVNKEMQSSNLYMSMSSWCYTHSLDGAGLFLFDHAAEEYEHAKKLIIFLNENNVPVQLTSISAPEHKFEGLTQIFQKAYEHEQHISESINNIVDHAIKSKDHATFNFLQWYVAEQHEEEVLFKDILDKIELIGNENHGLYLADQYVKGIAKSRKSGS

SEQ ID NO: 162 - protein, 1318 aa, Artificial Sequence
  Description of Artificial Sequence: Synthetic polypeptide
SSQCVNLTTRTQLPPAYTNSFTRGVYYPDKVFRSSVLHSTQDLFLPFFSNVTWFHAIHVSGTNGTKRFDNPVLPFNDGVYFASTEKSNIIRGWIFGTTLDSKTQSLLIVNNATNVVIKVCEFQFCNDPFLGVYYHKNNKSWMESEFRVYSSANNCTFEYVSQPFLMDLEGKQGNFKNLREFVFKNIDGYFKIYSKHTPINLVRDLPQGFSALEPLVDLPIGINITRFQTLLALHRSYLTPGDSSSGWTAGAAAYYVGYLQPRTFLLKYNENGTITDAVDCALDPLSETKCTLKSFTVEKGIYQTSNFRVQPTESIVRFPNITNLCPFGEVFNATRFASVYAWNRKRISNCVADYSVLYNSASFSTFKCYGVSPTKLNDLCFTNVYADSFVIRGDEVRQIAPGQTGKIADYNYKLPDDFTGCVIAWNSNNLDSKVGGNYNYLYRLFRKSNLKPFERDISTEIYQAGSTPCNGVEGFNCYFPLQSYGFQPTNGVGYQPYRVVVLSFELLHAPATVCGPKKSTNLVKNKCVNFNFNGLTGTGVLTESNKKFLPFQQFGRDIADTTDAVRDPQTLEILDITPCSFGGVSVITPGTNTSNQVAVLYQDVNCTEVPVAIHADQLTPTWRVYSTGSNVFQTRAGCLIGAEHVNNSYECDIPIGAGICASYQTQTNSPGSASSVASQSIIAYTMSLGAENSVAYSNNSIAIPTNFTISVTTEILPVSMTKTSVDCTMYICGDSTECSNLLLQYGSFCTQLNRALTGIAVEQDKCTQEVFAQVKQIYKTPPIKDFGGFNFSQILPDPSKPSKRSFIEDLLFNKVTLADAGFIKQYGDCLGDIAARDLICAQKFNGLTVLPPLLTDEMIAQYTSALLAGTITSGWTFGAGAALQIPFAMQMAYRFNGIGVTQNVLYENQKLIANQFNSAIGKIQDSLSSTASALGKLQDVVNQNAQALNTLVKQLSSNFGAISSVLNDILSRLDPPEAEVQIDRLITGRLQSLQTYVTQQLIRAAEIRASCNLAATKMSECVLGQSKRVDFCGKGYHLMSFPQSAPHGVVFLHVTYVPAQEKNFTTAPAICHDGKAHFPREGVFVSNGTHWFVTQRNFYEPQIITTDNTFVSGNCDVVIGIVNNTVYDPLQSELDSIKEELDKIHKNGSGGSGDIIKLLNEQVNKEMQSSNLYMSMSSWCYTHSLDGAGLFLFDHAAEEYEHAKKLIIFLNENNVPVQLTSISAPEHKFEGLTQIFQKAYEHEQHISESINNIVDHAIKSKDHATFNFLQWYVAEQHEEEVLFKDILDKIELIGNENHGLYLADQYVKGIAKSRKSGS

SEQ ID NO: 163 - protein, 1310 aa, Artificial Sequence
  Description of Artificial Sequence: Synthetic polypeptide
VNLTTRTQLPPAYTNSFTRGVYYPDKVFRSSVLHSTQDLFLPFFSNVTWFHAIHVSGTNGTKRFDNPVLPFNDGVYFASTEKSNIIRGWIFGTTLDSKTQSLLIVNNATNVVIKVCEFQFCNDPFLGVYYHKNNKSWMESEFRVYSSANNCTFEYVSQPFLMDLEGKQGNFKNLREFVFKNIDGYFKIYSKHTPINLVRDLPQGFSALEPLVDLPIGINITRFQTLLALHRSYLTPGDSSSGWTAGAAAYYVGYLQPRTFLLKYNENGTITDAVDCALDPLSETKCTLKSFTVEKGIYQTSNFRVQPTESIVRFPNITNLCPFGEVFNATRFASVYAWNRKRISNCVADYSVLYNSASFSTFKCYGVSPTKLNDLCFTNVYADSFVIRGDEVRQIAPGQTGKIADYNYKLPDDFTGCVIAWNSNNLDSKVGGNYNYLYRLFRKSNLKPFERDISTEIYQAGSTPCNGVEGFNCYFPLQSYGFQPTNGVGYQPYRVVVLSFELLHAPATVCGPKKSTNLVKNKCVNFNFNGLTGTGVLTESNKKFLPFQQFGRDIADTTDAVRDPQTLEILDITPCSFGGVSVITPGTNTSNQVAVLYQDVNCTEVPVAIHADQLTPTWRVYSTGSNVFQTRAGCLIGAEHVNNSYECDIPIGAGICASYQTQTNSPGSASSVASQSIIAYTMSLGAENSVAYSNNSIAIPTNFTISVTTEILPVSMTCTSVDCTMYICGDSTECSNLLLQYGSFCTQLNRALTGICVEQDKNTQEVFAQVKQIYKTPPIKDFGGFNFSQILPDPSKPSKRSFIEDLLFNKVTLADAGFIKQYGDCLGDIAARDLICAQKFNGLTVLPPLLTDEMIAQYTSALLAGTITSGWTFGAGAALQIPFAMQMAYRFNGIGVTQNVLYENQKLIANQFNSAIGKIQDSLSSTASALGKLQDVVNQNAQALNTLVKQLSSNFGAISSVLNDILSRLDPPEAEVQIDRLITGRLQSLQTYVTQQLIRAAEIRASANLAATKMSECVLGQSKRVDFCGKGYHLMSFPQSAPHGVVFLHVTYVPAQEKNFTTAPAICHDGKAHFPREGVFVSNGTHWFVTQRNFYEPQIITTDNTFVSGNCDVVIGIVNNTVYDPLQPELDSFKEELDKGSGGSGDIIKLLNEQVNKEMQSSNLYMSMSSWCYTHSLDGAGLFLFDHAAEEYEHAKKLIIFLNENNVPVQLTSISAPEHKFEGLTQIFQKAYEHEQHISESINNIVDHAIKSKDHATFNFLQWYVAEQHEEEVLFKDILDKIELIGNENHGLYLADQYVKGIAKSRKSGS

SEQ ID NO: 164 - protein, 1318 aa, Artificial Sequence
  Description of Artificial Sequence: Synthetic polypeptide
SSQCVNLTTRTQLPPAYTNSFTRGVYYPDKVFRSSVLHSTQDLFLPFFSNVTWFHAIHVSGTNGTKRFDNPVLPFNDGVYFASTEKSNIIRGWIFGTTLDSKTQSLLIVNNATNVVIKVCEFQFCNDPFLGVYYHKNNKSWMESEFRVYSSANNCTFEYVSQPFLMDLEGKQGNFKNLREFVFKNIDGYFKIYSKHTPINLVRDLPQGFSALEPLVDLPIGINITRFQTLLALHRSYLTPGDSSSGWTAGAAAYYVGYLQPRTFLLKYNENGTITDAVDCALDPLSETKCTLKSFTVEKGIYQTSNFRVQPTESIVRFPNITNLCPFGEVFNATRFASVYAWNRKRISNCVADYSVLYNSASFSTFKCYGVSPTKLNDLCFTNVYADSFVIRGDEVRQIAPGQTGKIADYNYKLPDDFTGCVIAWNSNNLDSKVGGNYNYLYRLFRKSNLKPFERDISTEIYQAGSTPCNGVEGFNCYFPLQSYGFQPTNGVGYQPYRVVVLSFELLHAPATVCGPKKSTNLVKNKCVNFNFNGLTGTGVLTESNKKFLPFQQFGRDIADTTDAVRDPQTLEILDITPCSFGGVSVITPGTNTSNQVAVLYQDVNCTEVPVAIHADQLTPTWRVYSTGSNVFQTRAGCLIGAEHVNNSYECDIPIGAGICASYQTQTNSPGSASSVASQSIIAYTMSLGAENSVAYSNNSIAIPTNFTISVTTEILPVSMTCTSVDCTMYICGDSTECSNLLLQYGSFCTQLNRALTGICVEQDKNTQEVFAQVKQIYKTPPIKDFGGFNFSQILPDPSKPSKRSFIEDLLFNKVTLADAGFIKQYGDCLGDIAARDLICAQKFNGLTVLPPLLTDEMIAQYTSALLAGTITSGWTFGAGAALQIPFAMQMAYRFNGIGVTQNVLYENQKLIANQFNSAIGKIQDSLSSTASALGKLQDVVNQNAQALNTLVKQLSSNFGAISSVLNDILSRLDPPEAEVQIDRLITGRLQSLQTYVTQQLIRAAEIRASANLAATKMSECVLGQSKRVDFCGKGYHLMSFPQSAPHGVVFLHVTYVPAQEKNFTTAPAICHDGKAHFPREGVFVSNGTHWFVTQRNFYEPQIITTDNTFVSGNCDVVIGIVNNTVYDPLQSELDSIKEELDKIHKNGSGGSGDIIKLLNEQVNKEMQSSNLYMSMSSWCYTHSLDGAGLFLFDHAAEEYEHAKKLIIFLNENNVPVQLTSISAPEHKFEGLTQIFQKAYEHEQHISESINNIVDHAIKSKDHATFNFLQWYVAEQHEEEVLFKDILDKIELIGNENHGLYLADQYVKGIAKSRKSGS

SEQ ID NO: 165 - protein, 1310 aa, Artificial Sequence
  Description of Artificial Sequence: Synthetic polypeptide
VNLTTRTQLPPAYTNSFTRGVYYPDKVFRSSVLHSTQDLFLPFFSNVTWFHAIHVSGTNGTKRFDNPVLPFNDGVYFASTEKSNIIRGWIFGTTLDSKTQSLLIVNNATNVVIKVCEFQFCNDPFLGVYYHKNNKSWMESEFRVYSSANNCTFEYVSQPFLMDLEGKQGNFKNLREFVFKNIDGYFKIYSKHTPINLVRDLPQGFSALEPLVDLPIGINITRFQTLLALHRSYLTPGDSSSGWTAGAAAYYVGYLQPRTFLLKYNENGTITDAVDCALDPLSETKCTLKSFTVEKGIYQTSNFRVQPTESIVRFPNITNLCPFGEVFNATRFASVYAWNRKRISNCVADYSVLYNSASFSTFKCYGVSPTKLNDLCFTNVYADSFVIRGDEVRQIAPGQTGKIADYNYKLPDDFTGCVIAWNSNNLDSKVGGNYNYLYRLFRKSNLKPFERDISTEIYQAGSTPCNGVEGFNCYFPLQSYGFQPTNGVGYQPYRVVVLSFELLHAPATVCGPKKSTNLVKNKCVNFNFNGLTGTGVLTESNKKFLPFQQFGRDILDTIDAVRDPQTLEILDITPCSFGGVSVITPGTNTSNQVAVLYQDVNCTEVPVAIHADQLTPTWRVYSTGSNVFQTRAGCLIGAEHVNNSYECDIPIGAGICASYQTQTNSPGSASSVASQSIIAYTMSLGAENSVAYSNNSIAIPTNFTISVTTEILPVSMTKTSVDCTMYICGDSTECSNLLLQYGSFCTQLNRALTGIAVEQDKNTQEVFAQVKQIYKTPPIKDFGGFNFSQILPDPSKPSKRSFIEDLLFNKVTLADAGFIKQYGDCLGDIAARDLICAQKYIGLTVLPPLLTDEMIAQYTSALLAGTITSGWTFGAGAALQIPFAMQMAYRFNGIGVTQNVLYENQKLIANQFNSAIGKIQDSLSSTASALGKLQDVVNQNAQALNTLVKQLSSNFGAISSVLNDILSRLDPPEAEVQIDRLITGRLQSLQTYVTQQLIRAAEIRASANLAATKMSECVLGQSKRVDFCGKGYHLMSFPQSAPHGVVFLHVTYVPAQEKNFTTAPAICHDGKAHFPREGVFVSNGTHWFVTQRNFYEPQIITTDNTFVSGNCDVVIGIVNNTVYDPLQPELDSFKEELDKGSGGSGDIIKLLNEQVNKEMQSSNLYMSMSSWCYTHSLDGAGLFLFDHAAEEYEHAKKLIIFLNENNVPVQLTSISAPEHKFEGLTQIFQKAYEHEQHISESINNIVDHAIKSKDHATFNFLQWYVAEQHEEEVLFKDILDKIELIGNENHGLYLADQYVKGIAKSRKSGS

SEQ ID NO: 166 - protein, 1318 aa, Artificial Sequence
  Description of Artificial Sequence: Synthetic polypeptide
SSQCVNLTTRTQLPPAYTNSFTRGVYYPDKVFRSSVLHSTQDLFLPFFSNVTWFHAIHVSGTNGTKRFDNPVLPFNDGVYFASTEKSNIIRGWIFGTTLDSKTQSLLIVNNATNVVIKVCEFQFCNDPFLGVYYHKNNKSWMESEFRVYSSANNCTFEYVSQPFLMDLEGKQGNFKNLREFVFKNIDGYFKIYSKHTPINLVRDLPQGFSALEPLVDLPIGINITRFQTLLALHRSYLTPGDSSSGWTAGAAAYYVGYLQPRTFLLKYNENGTITDAVDCALDPLSETKCTLKSFTVEKGIYQTSNFRVQPTESIVRFPNITNLCPFGEVFNATRFASVYAWNRKRISNCVADYSVLYNSASFSTFKCYGVSPTKLNDLCFTNVYADSFVIRGDEVRQIAPGQTGKIADYNYKLPDDFTGCVIAWNSNNLDSKVGGNYNYLYRLFRKSNLKPFERDISTEIYQAGSTPCNGVEGFNCYFPLQSYGFQPTNGVGYQPYRVVVLSFELLHAPATVCGPKKSTNLVKNKCVNFNFNGLTGTGVLTESNKKFLPFQQFGRDILDTIDAVRDPQTLEILDITPCSFGGVSVITPGTNTSNQVAVLYQDVNCTEVPVAIHADQLTPTWRVYSTGSNVFQTRAGCLIGAEHVNNSYECDIPIGAGICASYQTQTNSPGSASSVASQSIIAYTMSLGAENSVAYSNNSIAIPTNFTISVTTEILPVSMTKTSVDCTMYICGDSTECSNLLLQYGSFCTQLNRALTGIAVEQDKNTQEVFAQVKQIYKTPPIKDFGGFNFSQILPDPSKPSKRSFIEDLLFNKVTLADAGFIKQYGDCLGDIAARDLICAQKYIGLTVLPPLLTDEMIAQYTSALLAGTITSGWTFGAGAALQIPFAMQMAYRFNGIGVTQNVLYENQKLIANQFNSAIGKIQDSLSSTASALGKLQDVVNQNAQALNTLVKQLSSNFGAISSVLNDILSRLDPPEAEVQIDRLITGRLQSLQTYVTQQLIRAAEIRASANLAATKMSECVLGQSKRVDFCGKGYHLMSFPQSAPHGVVFLHVTYVPAQEKNFTTAPAICHDGKAHFPREGVFVSNGTHWFVTQRNFYEPQIITTDNTFVSGNCDVVIGIVNNTVYDPLQSELDSIKEELDKIHKNGSGGSGDIIKLLNEQVNKEMQSSNLYMSMSSWCYTHSLDGAGLFLFDHAAEEYEHAKKLIIFLNENNVPVQLTSISAPEHKFEGLTQIFQKAYEHEQHISESINNIVDHAIKSKDHATFNFLQWYVAEQHEEEVLFKDILDKIELIGNENHGLYLADQYVKGIAKSRKSGS

SEQ ID NO: 167 - protein, 1310 aa, Artificial Sequence
  Description of Artificial Sequence: Synthetic polypeptide
VNLTTRTQLPPAYTNSFTRGVYYPDKVFRSSVLHSTQDLFLPFFSNVTWFHAIHVSGTNGTKRFDNPVLPFNDGVYFASTEKSNIIRGWIFGTTLDSKTQSLLIVNNATNVVIKVCEFQFCNDPFLGVYYHKNNKSWMESEFRVYSSANNCTFEYVSQPFLMDLEGKQGNFKNLREFVFKNIDGYFKIYSKHTPINLVRDLPQGFSALEPLVDLPIGINITRFQTLLALHRSYLTPGDSSSGWTAGAAAYYVGYLQPRTFLLKYNENGTITDAVDCALDPLSETKCTLKSFTVEKGIYQTSNFRVQPTESIVRFPNITNLCPFGEVFNATRFASVYAWNRKRISNCVADYSVLYNSASFSTFKCYGVSPTKLNDLCFTNVYADSFVIRGDEVRQIAPGQTGKIADYNYKLPDDFTGCVIAWNSNNLDSKVGGNYNYLYRLFRKSNLKPFERDISTEIYQAGSTPCNGVEGFNCYFPLQSYGFQPTNGVGYQPYRVVVLSFELLHAPATVCGPKKSTNLVKNKCVNFNFNGLTGTGVLTESNKKFLPFQQFGRDIADTTDAVRDPQTLEILDITPCSFGGVSVITPGTNTSNQVAVLYQDVNCTEVPVAIHADQLTPTWRVYSTGSNVFQTRAGCLIGAEHVNNSYECDIPIGAGICASYQTQTNSPGSASSVASQSIIAYTMSLGAENSVAYSNNSIAIPTNFTISVTTEILPVSMTKTSVDCTMYICGDSTECSNLLLQYGSFCTQLNRALTGIAVEQDKNTQEVFAQVKQIYKTPPIKDFGGFNFSQILPDPSKPSKRSPIEDLLFNKVTLADAGFIKQYGDCLGDIAARDLICAQKFNGLTVLPPLLTDEMIAQYTSALLAGTITSGWTFGAGPALQIPFPMQMAYRFNGIGVTQNVLYENQKLIANQFNSAIGKIQDSLSSTPSALGKLQDVVNQNAQALNTLVKQLSSNFGAISSVLNDILSRLDPPEAEVQIDRLITGRLQSLQTYVTQQLIRAAEIRASANLAATKMSECVLGQSKRVDFCGKGYHLMSFPQSAPHGVVFLHVTYVPAQEKNFTTAPAICHDGKAHFPREGVFVSNGTHWFVTQRNFYEPQIITTDNTFVSGNCDVVIGIVNNTVYDPLQPELDSFKEELDKGSGGSGDIIKLLNEQVNKEMQSSNLYMSMSSWCYTHSLDGAGLFLFDHAAEEYEHAKKLIIFLNENNVPVQLTSISAPEHKFEGLTQIFQKAYEHEQHISESINNIVDHAIKSKDHATFNFLQWYVAEQHEEEVLFKDILDKIELIGNENHGLYLADQYVKGIAKSRKSGS

SEQ ID NO: 168 - protein, 1318 aa, Artificial Sequence
  Description of Artificial Sequence: Synthetic polypeptide
SSQCVNLTTRTQLPPAYTNSFTRGVYYPDKVFRSSVLHSTQDLFLPFFSNVTWFHAIHVSGTNGTKRFDNPVLPFNDGVYFASTEKSNIIRGWIFGTTLDSKTQSLLIVNNATNVVIKVCEFQFCNDPFLGVYYHKNNKSWMESEFRVYSSANNCTFEYVSQPFLMDLEGKQGNFKNLREFVFKNIDGYFKIYSKHTPINLVRDLPQGFSALEPLVDLPIGINITRFQTLLALHRSYLTPGDSSSGWTAGAAAYYVGYLQPRTFLLKYNENGTITDAVDCALDPLSETKCTLKSFTVEKGIYQTSNFRVQPTESIVRFPNITNLCPFGEVFNATRFASVYAWNRKRISNCVADYSVLYNSASFSTFKCYGVSPTKLNDLCFTNVYADSFVIRGDEVRQIAPGQTGKIADYNYKLPDDFTGCVIAWNSNNLDSKVGGNYNYLYRLFRKSNLKPFERDISTEIYQAGSTPCNGVEGFNCYFPLQSYGFQPTNGVGYQPYRVVVLSFELLHAPATVCGPKKSTNLVKNKCVNFNFNGLTGTGVLTESNKKFLPFQQFGRDIADTTDAVRDPQTLEILDITPCSFGGVSVITPGTNTSNQVAVLYQDVNCTEVPVAIHADQLTPTWRVYSTGSNVFQTRAGCLIGAEHVNNSYECDIPIGAGICASYQTQTNSPGSASSVASQSIIAYTMSLGAENSVAYSNNSIAIPTNFTISVTTEILPVSMTKTSVDCTMYICGDSTECSNLLLQYGSFCTQLNRALTGIAVEQDKNTQEVFAQVKQIYKTPPIKDFGGFNFSQILPDPSKPSKRSPIEDLLFNKVTLADAGFIKQYGDCLGDIAARDLICAQKFNGLTVLPPLLTDEMIAQYTSALLAGTITSGWTFGAGPALQIPFPMQMAYRFNGIGVTQNVLYENQKLIANQFNSAIGKIQDSLSSTPSALGKLQDVVNQNAQALNTLVKQLSSNFGAISSVLNDILSRLDPPEAEVQIDRLITGRLQSLQTYVTQQLIRAAEIRASANLAATKMSECVLGQSKRVDFCGKGYHLMSFPQSAPHGVVFLHVTYVPAQEKNFTTAPAICHDGKAHFPREGVFVSNGTHWFVTQRNFYEPQIITTDNTFVSGNCDVVIGIVNNTVYDPLQSELDSIKEELDKIHKNGSGGSGDIIKLLNEQVNKEMQSSNLYMSMSSWCYTHSLDGAGLFLFDHAAEEYEHAKKLIIFLNENNVPVQLTSISAPEHKFEGLTQIFQKAYEHEQHISESINNIVDHAIKSKDHATFNFLQWYVAEQHEEEVLFKDILDKIELIGNENHGLYLADQYVKGIAKSRKSGS

SEQ ID NO: 169 - protein, 1318 aa, Artificial Sequence
  Description of Artificial Sequence: Synthetic polypeptide
SSQCVNLTTRTQLPPAYTNSFTRGVYYPDKVFRSSVLHSTQDLFLPFFSNVTWFHAIHVSGTNGTKRFDNPVLPFNDGVYFASTEKSNIIRGWIFGTTLDSKTQSLLIVNNATNVVIKVCEFQFCNDPFLGVYYHKNNKSWMESEFRVYSSANNCTFEYVSQPFLMDLEGKQGNFKNLREFVFKNIDGYFKIYSKHTPINLVRDLPQGFSALEPLVDLPIGINITRFQTLLALHRSYLTPGDSSSGWTAGAAAYYVGYLQPRTFLLKYNENGTITDAVDCALDPLSETKCTLKSFTVEKGIYQTSNFRVQPTESIVRFPNITNLCPFGEVFNATRFASVYAWNRKRISNCVADYSVLYNSASFSTFKCYGVSPTKLNDLCFTNVYADSFVIRGDEVRQIAPGQTGKIADYNYKLPDDFTGCVIAWNSNNLDSKVGGNYNYLYRLFRKSNLKPFERDISTEIYQAGSTPCNGVEGFNCYFPLQSYGFQPTNGVGYQPYRVVVLSFELLHAPATVCGPKKSTNLVKNKCVNFNFNGLTGTGVLTESNKKFLPFQQFGRDIADTTDAVRDPQTLEILDITPCSFGGVSVITPGTNTSNQVAVLYQDVNCTEVPVAIHADQLTPTWRVYSTGSNVFQTRAGCLIGAEHVNNSYECDIPIGAGICASYQTQTNSPGSASSVASQSIIAYTMSLGAENSVAYSNNSIAIPTNFTISVTTEILPVSMTKTSVDCTMYICGDSTECSNLLLQYGSFCTQLNRALTGIAVEQDKNTQEVFAQVKQIYKTPPIKDFGGFNFSQILPDPSKPSKRSPIEDLLFNKVTLADAGFIKQYGDCLGDIAARDLICAQKFNGLTVLPPLLTDEMIAQYTSALLAGTITSGWTFGAGPALQIPFPMQMAYRFNGIGVTQNVLYENQKLIANQFNSAIGKIQDSLSSTPSALGKLQDVVNQNAQALNTLVKQLSSNFGAISSVLNDILSRLDPPEAEVQIDRLITGRLQSLQTYVTQQLIRAAEIRASANLAATKMSECVLGQSKRVDFCGKGYHLMSFPQSAPHGVVFLHVTYVPAQEKNFTTAPAICHDGKAHFPREGVFVSNGTHWFVTQRNFYEPQIITTDNTFVSGNCDVVIGIVNNTVYDPLQPELDSIKEELDKIHKNGSGGSGDIIKLLNEQVNKEMQSSNLYMSMSSWCYTHSLDGAGLFLFDHAAEEYEHAKKLIIFLNENNVPVQLTSISAPEHKFEGLTQIFQKAYEHEQHISESINNIVDHAIKSKDHATFNFLQWYVAEQHEEEVLFKDILDKIELIGNENHGLYLADQYVKGIAKSRKSGS

SEQ ID NO: 170 - protein, 1271 aa, Artificial Sequence
  Description of Artificial Sequence: Synthetic polypeptide
VNLTTRTQLPPAYTNSFTRGVYYPDKVFRSSVLHSTQDLFLPFFSNVTWFHAIHVSGTNGTKRFDNPVLPFNDGVYFASTEKSNIIRGWIFGTTLDSKTQSLLIVNNATNVVIKVCEFQFCNDPFLGVYYHKNNKSWMESEFRVYSSANNCTFEYVSQPFLMDLEGKQGNFKNLREFVFKNIDGYFKIYSKHTPINLVRDLPQGFSALEPLVDLPIGINITRFQTLLALHRSYLTPGDSSSGWTAGAAAYYVGYLQPRTFLLKYNENGTITDAVDCALDPLSETKCTLKSFTVEKGIYQTSNFRVQPTESIVRFPNITNLCPFGEVFNATRFASVYAWNRKRISNCVADYSVLYNSASFSTFKCYGVSPTKLNDLCFTNVYADSFVIRGDEVRQIAPGQTGKIADYNYKLPDDFTGCVIAWNSNNLDSKVGGNYNYLYRLFRKSNLKPFERDISTEIYQAGSTPCNGVEGFNCYFPLQSYGFQPTNGVGYQPYRVVVLSFELLHAPATVCGPKKSTNLVKNKCVNFNFNGLTGTGVLTESNKKFLPFQQFGRDIADTTDAVRDPQTLEILDITPCSFGGVSVITPGTNTSNQVAVLYQDVNCTEVPVAIHADQLTPTWRVYSTGSNVFQTRAGCLIGAEHVNNSYECDIPIGAGICASYQTQTNSPGSASSVASQSIIAYTMSLGAENSVAYSNNSIAIPTNFTISVTTEILPVSMTKTSVDCTMYICGDSTECSNLLLQYGSFCTQLNRALTGIAVEQDKNTQEVFAQVKQIYKTPPIKDFGGFNFSQILPDPSKPSKRSPIEDLLFNKVTLADAGFIKQYGDCLGDIAARDLICAQKFNGLTVLPPLLTDEMIAQYTSALLAGTITSGWTFGAGPALQIPFPMQMAYRFNGIGVTQNVLYENQKLIANQFNSAIGKIQDSLSSTPSALGKLQDVVNQNAQALNTLVKQLSSNFGAISSVLNDILSRLDPPEAEVQIDRLITGRLQSLQTYVTQQLIRAAEIRASANLAATKMSECVLGQSKRVDFCGKGYHLMSFPQSAPHGVVFLHVTYVPAQEKNFTTAPAICHDGKAHFPREGVFVSNGTHWFVTQRNFYEPQIITTDNTFVSGNCDVVIGIVNNTVYDPLQPELDSFKEELDKYFKNHTSPDVDLGDISGINASVVNIQKEIDRLNEVAKNLNESLIDLQELGKYEQGSGYIPEAPRDGQAYVRKDGEWVLLSTFLGLEVLFQGPSAWSHPQFEKGGGSGGGSGGSAWSHPQFEKGSHHHHHHHH

SEQ ID NO: 171 - protein, 1318 aa, Artificial Sequence
  Description of Artificial Sequence: Synthetic polypeptide
SSQCVNLTTRTQLPPAYTNSFTRGVYYPDKVFRSSVLHSTQDLFLPFFSNVTWFHAIHVSGTNGTKRFDNPVLPFNDGVYFASTEKSNIIRGWIFGTTLDSKTQSLLIVNNATNVVIKVCEFQFCNDPFLGVYYHKNNKSWMESEFRVYSSANNCTFEYVSQPFLMDLEGKQGNFKNLREFVFKNIDGYFKIYSKHTPINLVRDLPQGFSALEPLVDLPIGINITRFQTLLALHRSYLTPGDSSSGWTAGAAAYYVGYLQPRTFLLKYNENGTITDAVDCALDPLSETKCTLKSFTVEKGIYQTSNFRVQPTESIVRFPNITNLCPFGEVFNATRFASVYAWNRKRISNCVADYSVLYNSASFSTFKCYGVSPTKLNDLCFTNVYADSFVIRGDEVRQIAPGQTGKIADYNYKLPDDFTGCVIAWNSNNLDSKVGGNYNYLYRLFRKSNLKPFERDISTEIYQAGSTPCNGVEGFNCYFPLQSYGFQPTNGVGYQPYRVVVLSFELLHAPATVCGPKKSTNLVKNKCVNFNFNGLTGTGVLTESNKKFLPFQQFGRDIADTTDAVRDPQTLEILDITPCSFGGVSVITPGTNTSNQVAVLYQGVNCTEVPVAIHADQLTPTWRVYSTGSNVFQTRAGCLIGAEHVNNSYECDIPIGAGICASYQTQTNSPGSASSVASQSIIAYTMSLGAENSVAYSNNSIAIPTNFTISVTTEILPVSMTKTSVDCTMYICGDSTECSNLLLQYGSFCTQLNRALTGIAVEQDKNTQEVFAQVKQIYKTPPIKDFGGFNFSQILPDPSKPSKRSPIEDLLFNKVTLADAGFIKQYGDCLGDIAARDLICAQKFNGLTVLPPLLTDEMIAQYTSALLAGTITSGWTFGAGPALQIPFPMQMAYRFNGIGVTQNVLYENQKLIANQFNSAIGKIQDSLSSTPSALGKLQDVVNQNAQALNTLVKQLSSNFGAISSVLNDILSRLDPPEAEVQIDRLITGRLQSLQTYVTQQLIRAAEIRASANLAATKMSECVLGQSKRVDFCGKGYHLMSFPQSAPHGVVFLHVTYVPAQEKNFTTAPAICHDGKAHFPREGVFVSNGTHWFVTQRNFYEPQIITTDNTFVSGNCDVVIGIVNNTVYDPLQSELDSIKEELDKIHKNGSGGSGDIIKLLNEQVNKEMQSSNLYMSMSSWCYTHSLDGAGLFLFDHAAEEYEHAKKLIIFLNENNVPVQLTSISAPEHKFEGLTQIFQKAYEHEQHISESINNIVDHAIKSKDHATFNFLQWYVAEQHEEEVLFKDILDKIELIGNENHGLYLADQYVKGIAKSRKSGS

SEQ ID NO: 172 - protein, 1332 aa, Artificial Sequence
  Description of Artificial Sequence: Synthetic polypeptide
SSQCVNLTTRTQLPPAYTNSFTRGVYYPDKVFRSSVLHSTQDLFLPFFSNVTWFHAIHVSGTNGTKRFDNPVLPFNDGVYFASTEKSNIIRGWIFGTTLDSKTQSLLIVNNATNVVIKVCEFQFCNDPFLGVYYHKNNKSWMESEFRVYSSANNCTFEYVSQPFLMDLEGKQGNFKNLREFVFKNIDGYFKIYSKHTPINLVRDLPQGFSALEPLVDLPIGINITRFQTLLALHRSYLTPGDSSSGWTAGAAAYYVGYLQPRTFLLKYNENGTITDAVDCALDPLSETKCTLKSFTVEKGIYQTSNFRVQPTESIVRFPNITNLCPFGEVFNATRFASVYAWNRKRISNCVADYSVLYNSASFSTFKCYGVSPTKLNDLCFTNVYADSFVIRGDEVRQIAPGQTGKIADYNYKLPDDFTGCVIAWNSNNLDSKVGGNYNYLYRLFRKSNLKPFERDISTEIYQAGSTPCNGVEGFNCYFPLQSYGFQPTNGVGYQPYRVVVLSFELLHAPATVCGPKKSTNLVKNKCVNFNFNGLTGTGVLTESNKKFLPFQQFGRDIADTTDAVRDPQTLEILDITPCSFGGVSVITPGTNTSNQVAVLYQGVNCTEVPVAIHADQLTPTWRVYSTGSNVFQTRAGCLIGAEHVNNSYECDIPIGAGICASYQTQTNSPGSASSVASQSIIAYTMSLGAENSVAYSNNSIAIPTNFTISVTTEILPVSMTKTSVDCTMYICGDSTECSNLLLQYGSFCTQLNRALTGIAVEQDKNTQEVFAQVKQIYKTPPIKDFGGFNFSQILPDPSKPSKRSFIEDLLFNKVTLADAGFIKQYGDCLGDIAARDLICAQKFNGLTVLPPLLTDEMIAQYTSALLAGTITSGWTFGAGAALQIPFAMQMAYRFNGIGVTQNVLYENQKLIANQFNSAIGKIQDSLSSTASALGKLQDVVNQNAQALNTLVKQLSSNFGAISSVLNDILSRLDPPEAEVQIDRLITGRLQSLQTYVTQQLIRAAEIRASANLAATKMSECVLGQSKRVDFCGKGYHLMSFPQSAPHGVVFLHVTYVPAQEKNFTTAPAICHDGKAHFPREGVFVSNGTHWFVTQRNFYEPQIITTDNTFVSGNCDVVIGIVNNTVYDPLQSELDSIKEELDKIHKNLDSIKEELDKIHKNGSGGSGDIIKLLNEQVNKEMQSSNLYMSMSSWCYTHSLDGAGLFLFDHAAEEYEHAKKLIIFLNENNVPVQLTSISAPEHKFEGLTQIFQKAYEHEQHISESINNIVDHAIKSKDHATFNFLQWYVAEQHEEEVLFKDILDKIELIGNENHGLYLADQYVKGIAKSRKSGS

SEQ ID NO: 173 - protein, 1332 aa, Artificial Sequence
  Description of Artificial Sequence: Synthetic polypeptide
SSQCVNLTTRTQLPPAYTNSFTRGVYYPDKVFRSSVLHSTQDLFLPFFSNVTWFHAIHVSGTNGTKRFDNPVLPFNDGVYFASTEKSNIIRGWIFGTTLDSKTQSLLIVNNATNVVIKVCEFQFCNDPFLGVYYHKNNKSWMESEFRVYSSANNCTFEYVSQPFLMDLEGKQGNFKNLREFVFKNIDGYFKIYSKHTPINLVRDLPQGFSALEPLVDLPIGINITRFQTLLALHRSYLTPGDSSSGWTAGAAAYYVGYLQPRTFLLKYNENGTITDAVDCALDPLSETKCTLKSFTVEKGIYQTSNFRVQPTESIVRFPNITNLCPFGEVFNATRFASVYAWNRKRISNCVADYSVLYNSASFSTFKCYGVSPTKLNDLCFTNVYADSFVIRGDEVRQIAPGQTGKIADYNYKLPDDFTGCVIAWNSNNLDSKVGGNYNYLYRLFRKSNLKPFERDISTEIYQAGSTPCNGVEGFNCYFPLQSYGFQPTNGVGYQPYRVVVLSFELLHAPATVCGPKKSTNLVKNKCVNFNFNGLTGTGVLTESNKKFLPFQQFGRDIADTTDAVRDPQTLEILDITPCSFGGVSVITPGTNTSNQVAVLYQDVNCTEVPVAIHADQLTPTWRVYSTGSNVFQTRAGCLIGAEHVNNSYECDIPIGAGICASYQTQTNSPGSASSVASQSIIAYTMSLGAENSVAYSNNSIAIPTNFTISVTTEILPVSMTKTSVDCTMYICGDSTECSNLLLQYGSFCTQLNRALTGIAVEQDKNTQEVFAQVKQIYKTPPIKDFGGFNFSQILPDPSKPSKRSPIEDLLFNKVTLADAGFIKQYGDCLGDIAARDLICAQKFNGLTVLPPLLTDEMIAQYTSALLAGTITSGWTFGAGPALQIPFPMQMAYRFNGIGVTQNVLYENQKLIANQFNSAIGKIQDSLSSTPSALGKLQDVVNQNAQALNTLVKQLSSNFGAISSVLNDILSRLDPPEAEVQIDRLITGRLQSLQTYVTQQLIRAAEIRASANLAATKMSECVLGQSKRVDFCGKGYHLMSFPQSAPHGVVFLHVTYVPAQEKNFTTAPAICHDGKAHFPREGVFVSNGTHWFVTQRNFYEPQIITTDNTFVSGNCDVVIGIVNNTVYDPLQSELDSIKEELDKIHKNLDSIKEELDKIHKNGSGGSGDIIKLLNEQVNKEMQSSNLYMSMSSWCYTHSLDGAGLFLFDHAAEEYEHAKKLIIFLNENNVPVQLTSISAPEHKFEGLTQIFQKAYEHEQHISESINNIVDHAIKSKDHATFNFLQWYVAEQHEEEVLFKDILDKIELIGNENHGLYLADQYVKGIAKSRKSGS

SEQ ID NO: 174 - protein, 1332 aa, Artificial Sequence
  Description of Artificial Sequence: Synthetic polypeptide
SSQCVNLTTRTQLPPAYTNSFTRGVYYPDKVFRSSVLHSTQDLFLPFFSNVTWFHAIHVSGTNGTKRFDNPVLPFNDGVYFASTEKSNIIRGWIFGTTLDSKTQSLLIVNNATNVVIKVCEFQFCNDPFLGVYYHKNNKSWMESEFRVYSSANNCTFEYVSQPFLMDLEGKQGNFKNLREFVFKNIDGYFKIYSKHTPINLVRDLPQGFSALEPLVDLPIGINITRFQTLLALHRSYLTPGDSSSGWTAGAAAYYVGYLQPRTFLLKYNENGTITDAVDCALDPLSETKCTLKSFTVEKGIYQTSNFRVQPTESIVRFPNITNLCPFGEVFNATRFASVYAWNRKRISNCVADYSVLYNSASFSTFKCYGVSPTKLNDLCFTNVYADSFVIRGDEVRQIAPGQTGKIADYNYKLPDDFTGCVIAWNSNNLDSKVGGNYNYLYRLFRKSNLKPFERDISTEIYQAGSTPCNGVEGFNCYFPLQSYGFQPTNGVGYQPYRVVVLSFELLHAPATVCGPKKSTNLVKNKCVNFNFNGLTGTGVLTESNKKFLPFQQFGRDIADTTDAVRDPQTLEILDITPCSFGGVSVITPGTNTSNQVAVLYQGVNCTEVPVAIHADQLTPTWRVYSTGSNVFQTRAGCLIGAEHVNNSYECDIPIGAGICASYQTQTNSPGSASSVASQSIIAYTMSLGAENSVAYSNNSIAIPTNFTISVTTEILPVSMTKTSVDCTMYICGDSTECSNLLLQYGSFCTQLNRALTGIAVEQDKNTQEVFAQVKQIYKTPPIKDFGGFNFSQILPDPSKPSKRSPIEDLLFNKVTLADAGFIKQYGDCLGDIAARDLICAQKFNGLTVLPPLLTDEMIAQYTSALLAGTITSGWTFGAGPALQIPFPMQMAYRFNGIGVTQNVLYENQKLIANQFNSAIGKIQDSLSSTPSALGKLQDVVNQNAQALNTLVKQLSSNFGAISSVLNDILSRLDPPEAEVQIDRLITGRLQSLQTYVTQQLIRAAEIRASANLAATKMSECVLGQSKRVDFCGKGYHLMSFPQSAPHGVVFLHVTYVPAQEKNFTTAPAICHDGKAHFPREGVFVSNGTHWFVTQRNFYEPQIITTDNTFVSGNCDVVIGIVNNTVYDPLQSELDSIKEELDKIHKNLDSIKEELDKIHKNGSGGSGDIIKLLNEQVNKEMQSSNLYMSMSSWCYTHSLDGAGLFLFDHAAEEYEHAKKLIIFLNENNVPVQLTSISAPEHKFEGLTQIFQKAYEHEQHISESINNIVDHAIKSKDHATFNFLQWYVAEQHEEEVLFKDILDKIELIGNENHGLYLADQYVKGIAKSRKSGS

SEQ ID NO: 175 - protein, 1310 aa, Artificial Sequence
  Description of Artificial Sequence: Synthetic polypeptide
VNLTTRTQLPPAYTNSFTRGVYYPDKVFRSSVLHSTQDLFLPFFSNVTWFHAIHVSGTNGTKRFDNPVLPFNDGVYFASTEKSNIIRGWIFGTTLDSKTQSLLIVNNATNVVIKVCEFQFCNDPFLGVYYHKNNKSWMESEFRVYSSANNCTFEYVSQPFLMDLEGKQGNFKNLREFVFKNIDGYFKIYSKHTPINLVRDLPQGFSALEPLVDLPIGINITRFQTLLALHRSYLTPGDSSSGWTAGAAAYYVGYLQPRTFLLKYNENGTITDAVDCALDPLSETKCTLKSFTVEKGIYQTSNFRVQPTESIVRFPNITNLCPFGEVFNATRFASVYAWNRKRISNCVADYSVLYNSASFSTFKCYGVSPTKLNDLCFTNVYADSFVIRGDEVRQIAPGQTGKIADYNYKLPDDFTGCVIAWNSNNLDSKVGGNYNYLYRLFRKSNLKPFERDISTEIYQAGSTPCNGVEGFNCYFPLQSYGFQPTNGVGYQPYRVVVLSFELLHAPATVCGPKKSTNLVKNKCVNFNFNGLTGTGVLTESNKKFLPFQQFGRDIADTTDAVRDPQTLEILDITPCSFGGVSVITPGTNTSNQVAVLYQGVNCTEVPVAIHADQLTPTWRVYSTGSNVFQTRAGCLIGAEHVNNSYECDIPIGAGICASYQTQTNSPGSASSVASQSIIAYTMSLGAENSVAYSNNSIAIPTNFTISVTTEILPVSMTKTSVDCTMYICGDSTECSNLLLQYGSFCTQLNRALTGIAVEQDKNTQEVFAQVKQIYKTPPIKDFGGFNFSQILPDPSKPSKRSFIEDLLFNKVTLADAGFIKQYGDCLGDIAARDLICAQKFNGLTVLPPLLTDEMIAQYTSALLAGTITSGWTFGAGAALQIPFAMQMAYRFNGIGVTQNVLYENQKLIANQFNSAIGKIQDSLSSTASALGKLQDVVNQNAQALNTLVKQLSSNFGAISSVLNDILSRLDPPEAEVQIDRLITGRLQSLQTYVTQQLIRAAEIRASANLAATKMSECVLGQSKRVDFCGKGYHLMSFPQSAPHGVVFLHVTYVPAQEKNFTTAPAICHDGKAHFPREGVFVSNGTHWFVTQRNFYEPQIITTDNTFVSGNCDVVIGIVNNTVYDPLQPELDSFKEELDKGSGGSGDIIKLLNEQVNKEMQSSNLYMSMSSWCYTHSLDGAGLFLFDHAAEEYEHAKKLIIFLNENNVPVQLTSISAPEHKFEGLTQIFQKAYEHEQHISESINNIVDHAIKSKDHATFNFLQWYVAEQHEEEVLFKDILDKIELIGNENHGLYLADQYVKGIAKSRKSGS

SEQ ID NO: 176 - protein, 1318 aa, Artificial Sequence
  Description of Artificial Sequence: Synthetic polypeptide
SSQCVNLTTRTQLPPAYTNSFTRGVYYPDKVFRSSVLHSTQDLFLPFFSNVTWFHAIHVSGTNGTKRFDNPVLPFNDGVYFASTEKSNIIRGWIFGTTLDSKTQSLLIVNNATNVVIKVCEFQFCNDPFLGVYYHKNNKSWMESEFRVYSSANNCTFEYVSQPFLMDLEGKQGNFKNLREFVFKNIDGYFKIYSKHTPINLVRDLPQGFSALEPLVDLPIGINITRFQTLLALHRSYLTPGDSSSGWTAGAAAYYVGYLQPRTFLLKYNENGTITDAVDCALDPLSETKCTLKSFTVEKGIYQTSNFRVQPTESIVRFPNITNLCPFGEVFNATRFASVYAWNRKRISNCVADYSVLYNSASFSTFKCYGVCPTKLNDLCFTNVYADSFVIRGDEVRQIAPGQTGKIADYNYKLPDDFTGCVIAWNSNNLDSKVGGNYNYLYRLFRKSNLKPFERDISTEIYQAGSTPCNGVEGFNCYFPLQSYGFQPTNGVGYQPYRVVVLSFELLHAPATVCGPKKSTNLVKNKCVNFNFNGLTGTGVLTESNKKFLPFQQFGRDIADTTDAVRDPQTLEILDITPCSFGGVSVITPGTNTSNQVAVLYQDVNCTEVPVAIHADQLTPTWRVYSTGSNVFQTRAGCLIGAEHVNNSYECDIPIGAGICASYQTQTNSPGSASSVASQSIIAYTMSLGAENSVAYSNNSIAIPTNFTISVTTEILPVSMTKTSVDCTMYICGDSTECSNLLLQYGSFCTQLNRALTGIAVEQDKNTQEVFAQVKQIYKTPPIKDFGGFNFSQILPDPSKPSKRSPIEDLLFNKVTLADAGFIKQYGDCLGDIAARDLICAQKFNGLTVLPPLLTDEMIAQYTSALLAGTITSGWTFGAGPALQIPFPMQMAYRFNGIGVTQNVLYENQKLIANQFNSAIGKIQDSLSSTPSALGKLQDVVNQNAQALNTLVKQLSSNFGAISSVLNDILSRLCPPEAEVQIDRLITGRLQSLQTYVTQQLIRAAEIRASANLAATKMSECVLGQSKRVDFCGKGYHLMSFPQSAPHGVVFLHVTYVPAQEKNFTTAPAICHDGKAHFPREGVFVSNGTHWFVTQRNFYEPQIITTDNTFVSGNCDVVIGIVNNTVYDPLQSELDSIKEELDKIHKNGSGGSGDIIKLLNEQVNKEMQSSNLYMSMSSWCYTHSLDGAGLFLFDHAAEEYEHAKKLIIFLNENNVPVQLTSISAPEHKFEGLTQIFQKAYEHEQHISESINNIVDHAIKSKDHATFNFLQWYVAEQHEEEVLFKDILDKIELIGNENHGLYLADQYVKGIAKSRKSGS

SEQ ID NO: 177 - protein, 1318 aa, Artificial Sequence
  Description of Artificial Sequence: Synthetic polypeptide
SSQCVNLTTRTQLPPAYTNSFTRGVYYPDKVFRSSVLHSTQDLFLPFFSNVTWFHAIHVSGTNGTKRFDNPVLPFNDGVYFASTEKSNIIRGWIFGTTLDSKTQSLLIVNNATNVVIKVCEFQFCNDPFLGVYYHKNNKSWMESEFRVYSSANNCTFEYVSQPFLMDLEGKQGNFKNLREFVFKNIDGYFKIYSKHTPINLVRDLPQGFSALEPLVDLPIGINITRFQTLLALHRSYLTPGDSSSGWTAGAAAYYVGYLQPRTFLLKYNENGTITDAVDCALDPLSETKCTLKSFTVEKGIYQTSNFRVQPTESIVRFPNITNLCPFGEVFNATRFASVYAWNRKRISNCVADYSVLYNSASFSTFKCYGVCPTKLNDLCFTNVYADSFVIRGDEVRQIAPGQTGKIADYNYKLPDDFTGCVIAWNSNNLDSKVGGNYNYLYRLFRKSNLKPFERDISTEIYQAGSTPCNGVEGFNCYFPLQSYGFQPTNGVGYQPYRVVVLSFELLHAPATVCGPKKSTNLVKNKCVNFNFNGLTGTGVLTESNKKFLPFQQFGRDIADTTDAVRDPQTLEILDITPCSFGGVSVITPGTNTSNQVAVLYQGVNCTEVPVAIHADQLTPTWRVYSTGSNVFQTRAGCLIGAEHVNNSYECDIPIGAGICASYQTQTNSPGSASSVASQSIIAYTMSLGAENSVAYSNNSIAIPTNFTISVTTEILPVSMTKTSVDCTMYICGDSTECSNLLLQYGSFCTQLNRALTGIAVEQDKNTQEVFAQVKQIYKTPPIKDFGGFNFSQILPDPSKPSKRSPIEDLLFNKVTLADAGFIKQYGDCLGDIAARDLICAQKFNGLTVLPPLLTDEMIAQYTSALLAGTITSGWTFGAGPALQIPFPMQMAYRFNGIGVTQNVLYENQKLIANQFNSAIGKIQDSLSSTPSALGKLQDVVNQNAQALNTLVKQLSSNFGAISSVLNDILSRLCPPEAEVQIDRLITGRLQSLQTYVTQQLIRAAEIRASANLAATKMSECVLGQSKRVDFCGKGYHLMSFPQSAPHGVVFLHVTYVPAQEKNFTTAPAICHDGKAHFPREGVFVSNGTHWFVTQRNFYEPQIITTDNTFVSGNCDVVIGIVNNTVYDPLQSELDSIKEELDKIHKNGSGGSGDIIKLLNEQVNKEMQSSNLYMSMSSWCYTHSLDGAGLFLFDHAAEEYEHAKKLIIFLNENNVPVQLTSISAPEHKFEGLTQIFQKAYEHEQHISESINNIVDHAIKSKDHATFNFLQWYVAEQHEEEVLFKDILDKIELIGNENHGLYLADQYVKGIAKSRKSGS

SEQ ID NO: 178 - protein, 1332 aa, Artificial Sequence
  Description of Artificial Sequence: Synthetic polypeptide
SSQCVNLTTRTQLPPAYTNSFTRGVYYPDKVFRSSVLHSTQDLFLPFFSNVTWFHAIHVSGTNGTKRFDNPVLPFNDGVYFASTEKSNIIRGWIFGTTLDSKTQSLLIVNNATNVVIKVCEFQFCNDPFLGVYYHKNNKSWMESEFRVYSSANNCTFEYVSQPFLMDLEGKQGNFKNLREFVFKNIDGYFKIYSKHTPINLVRDLPQGFSALEPLVDLPIGINITRFQTLLALHRSYLTPGDSSSGWTAGAAAYYVGYLQPRTFLLKYNENGTITDAVDCALDPLSETKCTLKSFTVEKGIYQTSNFRVQPTESIVRFPNITNLCPFGEVFNATRFASVYAWNRKRISNCVADYSVLYNSASFSTFKCYGVCPTKLNDLCFTNVYADSFVIRGDEVRQIAPGQTGKIADYNYKLPDDFTGCVIAWNSNNLDSKVGGNYNYLYRLFRKSNLKPFERDISTEIYQAGSTPCNGVEGFNCYFPLQSYGFQPTNGVGYQPYRVVVLSFELLHAPATVCGPKKSTNLVKNKCVNFNFNGLTGTGVLTESNKKFLPFQQFGRDIADTTDAVRDPQTLEILDITPCSFGGVSVITPGTNTSNQVAVLYQDVNCTEVPVAIHADQLTPTWRVYSTGSNVFQTRAGCLIGAEHVNNSYECDIPIGAGICASYQTQTNSPGSASSVASQSIIAYTMSLGAENSVAYSNNSIAIPTNFTISVTTEILPVSMTKTSVDCTMYICGDSTECSNLLLQYGSFCTQLNRALTGIAVEQDKNTQEVFAQVKQIYKTPPIKDFGGFNFSQILPDPSKPSKRSFIEDLLFNKVTLADAGFIKQYGDCLGDIAARDLICAQKFNGLTVLPPLLTDEMIAQYTSALLAGTITSGWTFGAGAALQIPFAMQMAYRFNGIGVTQNVLYENQKLIANQFNSAIGKIQDSLSSTASALGKLQDVVNQNAQALNTLVKQLSSNFGAISSVLNDILSRLCPPEAEVQIDRLITGRLQSLQTYVTQQLIRAAEIRASANLAATKMSECVLGQSKRVDFCGKGYHLMSFPQSAPHGVVFLHVTYVPAQEKNFTTAPAICHDGKAHFPREGVFVSNGTHWFVTQRNFYEPQIITTDNTFVSGNCDVVIGIVNNTVYDPLQSELDSIKEELDKIHKNLDSIKEELDKIHKNGSGGSGDIIKLLNEQVNKEMQSSNLYMSMSSWCYTHSLDGAGLFLFDHAAEEYEHAKKLIIFLNENNVPVQLTSISAPEHKFEGLTQIFQKAYEHEQHISESINNIVDHAIKSKDHATFNFLQWYVAEQHEEEVLFKDILDKIELIGNENHGLYLADQYVKGIAKSRKSGS

SEQ ID NO: 179 - protein, 1310 aa, Artificial Sequence
  Description of Artificial Sequence: Synthetic polypeptide
VNLTTRTQLPPAYTNSFTRGVYYPDKVFRSSVLHSTQDLFLPFFSNVTWFHAIHVSGTNGTKRFDNPVLPFNDGVYFASTEKSNIIRGWIFGTTLDSKTQSLLIVNNATNVVIKVCEFQFCNDPFLGVYYHKNNKSWMESEFRVYSSANNCTFEYVSQPFLMDLEGKQGNFKNLREFVFKNIDGYFKIYSKHTPINLVRDLPQGFSALEPLVDLPIGINITRFQTLLALHRSYLTPGDSSSGWTAGAAAYYVGYLQPRTFLLKYNENGTITDAVDCALDPLSETKCTLKSFTVEKGIYQTSNFRVQPTESIVRFPNITNLCPFGEVFNATRFASVYAWNRKRISNCVADYSVLYNSASFSTFKCYGVSPTKLNDLCFTNVYADSFVIRGDEVRQIAPGQTGKIADYNYKLPDDFTGCVIAWNSNNLDSKVGGNYNYLYRLFRKSNLKPFERDISTEIYQAGSTPCNGVEGFNCYFPLQSYGFQPTNGVGYQPYRVVVLSFELLHAPATVCGPKKSTNLVKNKCVNFNFNGLTGTGVLTESNKKFLPFQQFGRDIADTTDAVRDPQTLEILDITPCSFGGVSVITPGTNTSNQVAVLYQGVNCTEVPVAIHADQLTPTWRVYSTGSNVFQTRAGCLIGAEHVNNSYECDIPIGAGICASYQTQTNSPGSASSVASQSIIAYTMSLGAENSVAYSNNSIAIPTNFTISVTTEILPVSMTKTSVDCTMYICGDSTECSNLLLQYGSFCTQLNRALTGIAVEQDKNTQEVFAQVKQIYKTPPIKDFGGFNFSQILPDPSKPSKRSPIEDLLFNKVTLADAGFIKQYGDCLGDIAARDLICAQKFNGLTVLPPLLTDEMIAQYTSALLAGTITSGWTFGAGPALQIPFPMQMAYRFNGIGVTQNVLYENQKLIANQFNSAIGKIQDSLSSTPSALGKLQDVVNQNAQALNTLVKQLSSNFGAISSVLNDILSRLDPPEAEVQIDRLITGRLQSLQTYVTQQLIRAAEIRASANLAATKMSECVLGQSKRVDFCGKGYHLMSFPQSAPHGVVFLHVTYVPAQEKNFTTAPAICHDGKAHFPREGVFVSNGTHWFVTQRNFYEPQIITTDNTFVSGNCDVVIGIVNNTVYDPLQPELDSFKEELDKGSGGSGDIIKLLNEQVNKEMQSSNLYMSMSSWCYTHSLDGAGLFLFDHAAEEYEHAKKLIIFLNENNVPVQLTSISAPEHKFEGLTQIFQKAYEHEQHISESINNIVDHAIKSKDHATFNFLQWYVAEQHEEEVLFKDILDKIELIGNENHGLYLADQYVKGIAKSRKSGS

SEQ ID NO: 180 - protein, 1310 aa, Artificial Sequence
  Description of Artificial Sequence: Synthetic polypeptide
VNLTTRTQLPPAYTNSFTRGVYYPDKVFRSSVLHSTQDLFLPFFSNVTWFHAIHVSGTNGTKRFDNPVLPFNDGVYFASTEKSNIIRGWIFGTTLDSKTQSLLIVNNATNVVIKVCEFQFCNDPFLGVYYHKNNKSWMESEFRVYSSANNCTFEYVSQPFLMDLEGKQGNFKNLREFVFKNIDGYFKIYSKHTPINLVRDLPQGFSALEPLVDLPIGINITRFQTLLALHRSYLTPGDSSSGWTAGAAAYYVGYLQPRTFLLKYNENGTITDAVDCALDPLSETKCTLKSFTVEKGIYQTSNFRVQPTESIVRFPNITNLCPFGEVFNATRFASVYAWNRKRISNCVADYSVLYNSASFSTFKCYGVCPTKLNDLCFTNVYADSFVIRGDEVRQIAPGQTGKIADYNYKLPDDFTGCVIAWNSNNLDSKVGGNYNYLYRLFRKSNLKPFERDISTEIYQAGSTPCNGVEGFNCYFPLQSYGFQPTNGVGYQPYRVVVLSFELLHAPATVCGPKKSTNLVKNKCVNFNFNGLTGTGVLTESNKKFLPFQQFGRDIADTTDAVRDPQTLEILDITPCSFGGVSVITPGTNTSNQVAVLYQDVNCTEVPVAIHADQLTPTWRVYSTGSNVFQTRAGCLIGAEHVNNSYECDIPIGAGICASYQTQTNSPGSASSVASQSIIAYTMSLGAENSVAYSNNSIAIPTNFTISVTTEILPVSMTKTSVDCTMYICGDSTECSNLLLQYGSFCTQLNRALTGIAVEQDKNTQEVFAQVKQIYKTPPIKDFGGFNFSQILPDPSKPSKRSPIEDLLFNKVTLADAGFIKQYGDCLGDIAARDLICAQKFNGLTVLPPLLTDEMIAQYTSALLAGTITSGWTFGAGPALQIPFPMQMAYRFNGIGVTQNVLYENQKLIANQFNSAIGKIQDSLSSTPSALGKLQDVVNQNAQALNTLVKQLSSNFGAISSVLNDILSRLCPPEAEVQIDRLITGRLQSLQTYVTQQLIRAAEIRASANLAATKMSECVLGQSKRVDFCGKGYHLMSFPQSAPHGVVFLHVTYVPAQEKNFTTAPAICHDGKAHFPREGVFVSNGTHWFVTQRNFYEPQIITTDNTFVSGNCDVVIGIVNNTVYDPLQPELDSFKEELDKGSGGSGDIIKLLNEQVNKEMQSSNLYMSMSSWCYTHSLDGAGLFLFDHAAEEYEHAKKLIIFLNENNVPVQLTSISAPEHKFEGLTQIFQKAYEHEQHISESINNIVDHAIKSKDHATFNFLQWYVAEQHEEEVLFKDILDKIELIGNENHGLYLADQYVKGIAKSRKSGS

SEQ ID NO: 181 - protein, 1310 aa, Artificial Sequence
  Description of Artificial Sequence: Synthetic polypeptide
VNLTTRTQLPPAYTNSFTRGVYYPDKVFRSSVLHSTQDLFLPFFSNVTWFHAIHVSGTNGTKRFDNPVLPFNDGVYFASTEKSNIIRGWIFGTTLDSKTQSLLIVNNATNVVIKVCEFQFCNDPFLGVYYHKNNKSWMESEFRVYSSANNCTFEYVSQPFLMDLEGKQGNFKNLREFVFKNIDGYFKIYSKHTPINLVRDLPQGFSALEPLVDLPIGINITRFQTLLALHRSYLTPGDSSSGWTAGAAAYYVGYLQPRTFLLKYNENGTITDAVDCALDPLSETKCTLKSFTVEKGIYQTSNFRVQPTESIVRFPNITNLCPFGEVFNATRFASVYAWNRKRISNCVADYSVLYNSASFSTFKCYGVCPTKLNDLCFTNVYADSFVIRGDEVRQIAPGQTGKIADYNYKLPDDFTGCVIAWNSNNLDSKVGGNYNYLYRLFRKSNLKPFERDISTEIYQAGSTPCNGVEGFNCYFPLQSYGFQPTNGVGYQPYRVVVLSFELLHAPATVCGPKKSTNLVKNKCVNFNFNGLTGTGVLTESNKKFLPFQQFGRDIADTTDAVRDPQTLEILDITPCSFGGVSVITPGTNTSNQVAVLYQGVNCTEVPVAIHADQLTPTWRVYSTGSNVFQTRAGCLIGAEHVNNSYECDIPIGAGICASYQTQTNSPGSASSVASQSIIAYTMSLGAENSVAYSNNSIAIPTNFTISVTTEILPVSMTKTSVDCTMYICGDSTECSNLLLQYGSFCTQLNRALTGIAVEQDKNTQEVFAQVKQIYKTPPIKDFGGFNFSQILPDPSKPSKRSPIEDLLFNKVTLADAGFIKQYGDCLGDIAARDLICAQKFNGLTVLPPLLTDEMIAQYTSALLAGTITSGWTFGAGPALQIPFPMQMAYRFNGIGVTQNVLYENQKLIANQFNSAIGKIQDSLSSTPSALGKLQDVVNQNAQALNTLVKQLSSNFGAISSVLNDILSRLCPPEAEVQIDRLITGRLQSLQTYVTQQLIRAAEIRASANLAATKMSECVLGQSKRVDFCGKGYHLMSFPQSAPHGVVFLHVTYVPAQEKNFTTAPAICHDGKAHFPREGVFVSNGTHWFVTQRNFYEPQIITTDNTFVSGNCDVVIGIVNNTVYDPLQPELDSFKEELDKGSGGSGDIIKLLNEQVNKEMQSSNLYMSMSSWCYTHSLDGAGLFLFDHAAEEYEHAKKLIIFLNENNVPVQLTSISAPEHKFEGLTQIFQKAYEHEQHISESINNIVDHAIKSKDHATFNFLQWYVAEQHEEEVLFKDILDKIELIGNENHGLYLADQYVKGIAKSRKSGS

SEQ ID NO: 182 - protein, 1332 aa, Artificial Sequence
  Description of Artificial Sequence: Synthetic polypeptide
SSQCVNLTTRTQLPPAYTNSFTRGVYYPDKVFRSSVLHSTQDLFLPFFSNVTWFHAIHVSGTNGTKRFDNPVLPFNDGVYFASTEKSNIIRGWIFGTTLDSKTQSLLIVNNATNVVIKVCEFQFCNDPFLGVYYHKNNKSWMESEFRVYSSANNCTFEYVSQPFLMDLEGKQGNFKNLREFVFKNIDGYFKIYSKHTPINLVRDLPQGFSALEPLVDLPIGINITRFQTLLALHRSYLTPGDSSSGWTAGAAAYYVGYLQPRTFLLKYNENGTITDAVDCALDPLSETKCTLKSFTVEKGIYQTSNFRVQPTESIVRFPNITNLCPFGEVFNATRFASVYAWNRKRISNCVADYSVLYNSASFSTFKCYGVCPTKLNDLCFTNVYADSFVIRGDEVRQIAPGQTGKIADYNYKLPDDFTGCVIAWNSNNLDSKVGGNYNYLYRLFRKSNLKPFERDISTEIYQAGSTPCNGVEGFNCYFPLQSYGFQPTNGVGYQPYRVVVLSFELLHAPATVCGPKKSTNLVKNKCVNFNFNGLTGTGVLTESNKKFLPFQQFGRDIADTTDAVRDPQTLEILDITPCSFGGVSVITPGTNTSNQVAVLYQDVNCTEVPVAIHADQLTPTWRVYSTGSNVFQTRAGCLIGAEHVNNSYECDIPIGAGICASYQTQTNSPGSASSVASQSIIAYTMSLGAENSVAYSNNSIAIPTNFTISVTTEILPVSMTKTSVDCTMYICGDSTECSNLLLQYGSFCTQLNRALTGIAVEQDKNTQEVFAQVKQIYKTPPIKDFGGFNFSQILPDPSKPSKRSPIEDLLFNKVTLADAGFIKQYGDCLGDIAARDLICAQKFNGLTVLPPLLTDEMIAQYTSALLAGTITSGWTFGAGPALQIPFPMQMAYRFNGIGVTQNVLYENQKLIANQFNSAIGKIQDSLSSTPSALGKLQDVVNQNAQALNTLVKQLSSNFGAISSVLNDILSRLCPPEAEVQIDRLITGRLQSLQTYVTQQLIRAAEIRASANLAATKMSECVLGQSKRVDFCGKGYHLMSFPQSAPHGVVFLHVTYVPAQEKNFTTAPAICHDGKAHFPREGVFVSNGTHWFVTQRNFYEPQIITTDNTFVSGNCDVVIGIVNNTVYDPLQSELDSIKEELDKIHKNLDSIKEELDKIHKNGSGGSGDIIKLLNEQVNKEMQSSNLYMSMSSWCYTHSLDGAGLFLFDHAAEEYEHAKKLIIFLNENNVPVQLTSISAPEHKFEGLTQIFQKAYEHEQHISESINNIVDHAIKSKDHATFNFLQWYVAEQHEEEVLFKDILDKIELIGNENHGLYLADQYVKGIAKSRKSGS

SEQ ID NO: 183 - protein, 1332 aa, Artificial Sequence
  Description of Artificial Sequence: Synthetic polypeptide
SSQCVNLTTRTQLPPAYTNSFTRGVYYPDKVFRSSVLHSTQDLFLPFFSNVTWFHAIHVSGTNGTKRFDNPVLPFNDGVYFASTEKSNIIRGWIFGTTLDSKTQSLLIVNNATNVVIKVCEFQFCNDPFLGVYYHKNNKSWMESEFRVYSSANNCTFEYVSQPFLMDLEGKQGNFKNLREFVFKNIDGYFKIYSKHTPINLVRDLPQGFSALEPLVDLPIGINITRFQTLLALHRSYLTPGDSSSGWTAGAAAYYVGYLQPRTFLLKYNENGTITDAVDCALDPLSETKCTLKSFTVEKGIYQTSNFRVQPTESIVRFPNITNLCPFGEVFNATRFASVYAWNRKRISNCVADYSVLYNSASFSTFKCYGVCPTKLNDLCFTNVYADSFVIRGDEVRQIAPGQTGKIADYNYKLPDDFTGCVIAWNSNNLDSKVGGNYNYLYRLFRKSNLKPFERDISTEIYQAGSTPCNGVEGFNCYFPLQSYGFQPTNGVGYQPYRVVVLSFELLHAPATVCGPKKSTNLVKNKCVNFNFNGLTGTGVLTESNKKFLPFQQFGRDIADTTDAVRDPQTLEILDITPCSFGGVSVITPGTNTSNQVAVLYQGVNCTEVPVAIHADQLTPTWRVYSTGSNVFQTRAGCLIGAEHVNNSYECDIPIGAGICASYQTQTNSPGSASSVASQSIIAYTMSLGAENSVAYSNNSIAIPTNFTISVTTEILPVSMTKTSVDCTMYICGDSTECSNLLLQYGSFCTQLNRALTGIAVEQDKNTQEVFAQVKQIYKTPPIKDFGGFNFSQILPDPSKPSKRSPIEDLLFNKVTLADAGFIKQYGDCLGDIAARDLICAQKFNGLTVLPPLLTDEMIAQYTSALLAGTITSGWTFGAGPALQIPFPMQMAYRFNGIGVTQNVLYENQKLIANQFNSAIGKIQDSLSSTPSALGKLQDVVNQNAQALNTLVKQLSSNFGAISSVLNDILSRLCPPEAEVQIDRLITGRLQSLQTYVTQQLIRAAEIRASANLAATKMSECVLGQSKRVDFCGKGYHLMSFPQSAPHGVVFLHVTYVPAQEKNFTTAPAICHDGKAHFPREGVFVSNGTHWFVTQRNFYEPQIITTDNTFVSGNCDVVIGIVNNTVYDPLQSELDSIKEELDKIHKNLDSIKEELDKIHKNGSGGSGDIIKLLNEQVNKEMQSSNLYMSMSSWCYTHSLDGAGLFLFDHAAEEYEHAKKLIIFLNENNVPVQLTSISAPEHKFEGLTQIFQKAYEHEQHISESINNIVDHAIKSKDHATFNFLQWYVAEQHEEEVLFKDILDKIELIGNENHGLYLADQYVKGIAKSRKSGS

SEQ ID NO: 184 - protein, 396 aa, Artificial Sequence
  Description of Artificial Sequence: Synthetic polypeptide
HHHHHHHHGPLEVLFQGPNITNLCPFGEVFNATRFASVYAWNRKRISNCVADYSVLYNSASFSTFKCYGVSPTKLNDLCFTNVYADSFVIRGDEVRQIAPGQTGKIADYNYKLPDDFTGCVIAWNSNNLDSKVGGNKNYLRRRFRKSNLKPFERDISTEIYQAGSTPCNGVEGFNCYRPLQSYGFQPTNGVGYQPYRVVVLSFELLHAPATVCGPGSGGGGESQVRQQFSKDIEKLLNEQVNKEMQSSNLYMSMSSWCYTHSLDGAGLFLFDHAAEEYEHAKKLIIFLNENNVPVQLTSISAPEHKFEGLTQIFQKAYEHEQHISESINNIVDHAIKSKDHATFNFLQWYVAEQHEEEVLFKDILDKIELIGNENHGLYLADQYVKGIAKSRKSGS

SEQ ID NO: 185 - protein, 396 aa, Artificial Sequence
  Description of Artificial Sequence: Synthetic polypeptide
HHHHHHHHGPLEVLFQGPNITNLCPFGEVFNATRFASVYAWNRKRISNCVADYSVLYNSASFSTFKCYGVSPTKLNDLCFTNVYADSFVIRGDEVRQIAPGQTGKIADYNYKLPDDFTGCVIAWNSNNLDSKVGGNKNYLYRRFRKSNLKPFERDISTEIYQAGSTPCNGVEGFNCYAPLQSYGFQPTNGVGYQPYRVVVLSFELLHAPATVCGPGSGGGGESQVRQQFSKDIEKLLNEQVNKEMQSSNLYMSMSSWCYTHSLDGAGLFLFDHAAEEYEHAKKLIIFLNENNVPVQLTSISAPEHKFEGLTQIFQKAYEHEQHISESINNIVDHAIKSKDHATFNFLQWYVAEQHEEEVLFKDILDKIELIGNENHGLYLADQYVKGIAKSRKSGS

SEQ ID NO: 186 - protein, 1310 aa, Artificial Sequence
  Description of Artificial Sequence: Synthetic polypeptide
VNLTTRTQLPPAYTNSFTRGVYYPDKVFRSSVLHSTQDLFLPFFSNVTWFHAIHVSGTNGTKRFDNPVLPFNDGVYFASTEKSNIIRGWIFGTTLDSKTQSLLIVNNATNVVIKVCEFQFCNDPFLGVYYHKNNKSWMESEFRVYSSANNCTFEYVSQPFLMDLEGKQGNFKNLREFVFKNIDGYFKIYSKHTPINLVRDLPQGFSALEPLVDLPIGINITRFQTLLALHRSYLTPGDSSSGWTAGAAAYYVGYLQPRTFLLKYNENGTITDAVDCALDPLSETKCTLKSFTVEKGIYQTSNFRVQPTESIVRFPNITNLCPFGEVFNATRFASVYAWNRKRISNCVADYSVLYNSASFSTFKCYGVSPTKLNDLCFTNVYADSFVIRGDEVRQIAPGQTGKIADYNYKLPDDFTGCVIAWNSNNLDSKVGGNYNYLYRLFRKSNLKPFERDISTEIYQAGSTPCNGVEGFNCYFPLQSYGFQPTNGVGYQPYRVVVLSFELLHAPATVCGPKKSTNLVKNKCVNFNFNGLTGTGVLTESNKKFLPFQQFGRDIADTTDAVRDPQTLEILDITPCSFGGVSVITPGTNTSNQVAVLYQDVNCTEVPVAIHADQLTPTWRVYSTGSNVFQTRAGCLIGAEHVNNSYECDIPIGAGICASYQTQTNSPGSASSVASQSIIAYTMSLGAENSVAYSNNSIAIPTNFTISVTTEILPVSMTKTSVDCTMYICGDSTECSNLLLQYGSFCTQLNRALTGIAVEQDKNTQEVFAQVKQIYKTPPIKDFGGFNFSQILPDPSKPSKRSFIEDLLFNKVTLADAGFIKQYGDCLGDIAARDLICAQKFNGLTVLPPLLTDEMIAQYTSALLAGTITSGWTFGAGAALQIPFAMQMAYRFNGIGVTQNVLYENQKLIANQFNSAIGKIQDSLSSTASALGKLQDVVNQNAQALNTLVKQLSSNFGAISSVLNDILSRLDKVEAEVQIDRLITGRLQSLQTYVTQQLIRAAEIRASANLAATKMSECVLGQSKRVDFCGKGYHLMSFPQSAPHGVVFLHVTYVPAQEKNFTTAPAICHDGKAHFPREGVFVSNGTHWFVTQRNFYEPQIITTDNTFVSGNCDVVIGIVNNTVYDPLQPELDSFKEELDKGSGGSGDIIKLLNEQVNKEMQSSNLYMSMSSWCYTHSLDGAGLFLFDHAAEEYEHAKKLIIFLNENNVPVQLTSISAPEHKFEGLTQIFQKAYEHEQHISESINNIVDHAIKSKDHATFNFLQWYVAEQHEEEVLFKDILDKIELIGNENHGLYLADQYVKGIAKSRKSGS

SEQ ID NO: 187 - protein, 1318 aa, Artificial Sequence
  Description of Artificial Sequence: Synthetic polypeptide
SSQCVNLTTRTQLPPAYTNSFTRGVYYPDKVFRSSVLHSTQDLFLPFFSNVTWFHAIHVSGTNGTKRFDNPVLPFNDGVYFASTEKSNIIRGWIFGTTLDSKTQSLLIVNNATNVVIKVCEFQFCNDPFLGVYYHKNNKSWMESEFRVYSSANNCTFEYVSQPFLMDLEGKQGNFKNLREFVFKNIDGYFKIYSKHTPINLVRDLPQGFSALEPLVDLPIGINITRFQTLLALHRSYLTPGDSSSGWTAGAAAYYVGYLQPRTFLLKYNENGTITDAVDCALDPLSETKCTLKSFTVEKGIYQTSNFRVQPTESIVRFPNITNLCPFGEVFNATRFASVYAWNRKRISNCVADYSVLYNSASFSTFKCYGVSPTKLNDLCFTNVYADSFVIRGDEVRQIAPGQTGKIADYNYKLPDDFTGCVIAWNSNNLDSKVGGNYNYLYRLFRKSNLKPFERDISTEIYQAGSTPCNGVEGFNCYFPLQSYGFQPTNGVGYQPYRVVVLSFELLHAPATVCGPKKSTNLVKNKCVNFNFNGLTGTGVLTESNKKFLPFQQFGRDIADTTDAVRDPQTLEILDITPCSFGGVSVITPGTNTSNQVAVLYQDVNCTEVPVAIHADQLTPTWRVYSTGSNVFQTRAGCLIGAEHVNNSYECDIPIGAGICASYQTQTNSPGSASSVASQSIIAYTMSLGAENSVAYSNNSIAIPTNFTISVTTEILPVSMTKTSVDCTMYICGDSTECSNLLLQYGSFCTQLNRALTGIAVEQDKNTQEVFAQVKQIYKTPPIKDFGGFNFSQILPDPSKPSKRSFIEDLLFNKVTLADAGFIKQYGDCLGDIAARDLICAQKFNGLTVLPPLLTDEMIAQYTSALLAGTITSGWTFGAGAALQIPFAMQMAYRFNGIGVTQNVLYENQKLIANQFNSAIGKIQDSLSSTASALGKLQDVVNQNAQALNTLVKQLSSNFGAISSVLNDILSRLDKVEAEVQIDRLITGRLQSLQTYVTQQLIRAAEIRASANLAATKMSECVLGQSKRVDFCGKGYHLMSFPQSAPHGVVFLHVTYVPAQEKNFTTAPAICHDGKAHFPREGVFVSNGTHWFVTQRNFYEPQIITTDNTFVSGNCDVVIGIVNNTVYDPLQSELDSIKEELDKIHKNGSGGSGDIIKLLNEQVNKEMQSSNLYMSMSSWCYTHSLDGAGLFLFDHAAEEYEHAKKLIIFLNENNVPVQLTSISAPEHKFEGLTQIFQKAYEHEQHISESINNIVDHAIKSKDHATFNFLQWYVAEQHEEEVLFKDILDKIELIGNENHGLYLADQYVKGIAKSRKSGS

SEQ ID NO: 188 - protein, 1332 aa, Artificial Sequence
  Description of Artificial Sequence: Synthetic polypeptide
SSQCVNLTTRTQLPPAYTNSFTRGVYYPDKVFRSSVLHSTQDLFLPFFSNVTWFHAIHVSGTNGTKRFDNPVLPFNDGVYFASTEKSNIIRGWIFGTTLDSKTQSLLIVNNATNVVIKVCEFQFCNDPFLGVYYHKNNKSWMESEFRVYSSANNCTFEYVSQPFLMDLEGKQGNFKNLREFVFKNIDGYFKIYSKHTPINLVRDLPQGFSALEPLVDLPIGINITRFQTLLALHRSYLTPGDSSSGWTAGAAAYYVGYLQPRTFLLKYNENGTITDAVDCALDPLSETKCTLKSFTVEKGIYQTSNFRVQPTESIVRFPNITNLCPFGEVFNATRFASVYAWNRKRISNCVADYSVLYNSASFSTFKCYGVSPTKLNDLCFTNVYADSFVIRGDEVRQIAPGQTGKIADYNYKLPDDFTGCVIAWNSNNLDSKVGGNYNYLYRLFRKSNLKPFERDISTEIYQAGSTPCNGVEGFNCYFPLQSYGFQPTNGVGYQPYRVVVLSFELLHAPATVCGPKKSTNLVKNKCVNFNFNGLTGTGVLTESNKKFLPFQQFGRDIADTTDAVRDPQTLEILDITPCSFGGVSVITPGTNTSNQVAVLYQDVNCTEVPVAIHADQLTPTWRVYSTGSNVFQTRAGCLIGAEHVNNSYECDIPIGAGICASYQTQTNSPGSASSVASQSIIAYTMSLGAENSVAYSNNSIAIPTNFTISVTTEILPVSMTKTSVDCTMYICGDSTECSNLLLQYGSFCTQLNRALTGIAVEQDKNTQEVFAQVKQIYKTPPIKDFGGFNFSQILPDPSKPSKRSFIEDLLFNKVTLADAGFIKQYGDCLGDIAARDLICAQKFNGLTVLPPLLTDEMIAQYTSALLAGTITSGWTFGAGAALQIPFAMQMAYRFNGIGVTQNVLYENQKLIANQFNSAIGKIQDSLSSTASALGKLQDVVNQNAQALNTLVKQLSSNFGAISSVLNDILSRLDKVEAEVQIDRLITGRLQSLQTYVTQQLIRAAEIRASANLAATKMSECVLGQSKRVDFCGKGYHLMSFPQSAPHGVVFLHVTYVPAQEKNFTTAPAICHDGKAHFPREGVFVSNGTHWFVTQRNFYEPQIITTDNTFVSGNCDVVIGIVNNTVYDPLQSELDSIKEELDKIHKNLDSIKEELDKIHKNGSGGSGDIIKLLNEQVNKEMQSSNLYMSMSSWCYTHSLDGAGLFLFDHAAEEYEHAKKLIIFLNENNVPVQLTSISAPEHKFEGLTQIFQKAYEHEQHISESINNIVDHAIKSKDHATFNFLQWYVAEQHEEEVLFKDILDKIELIGNENHGLYLADQYVKGIAKSRKSGS

SEQ ID NO: 189 - protein, 676 aa, Artificial Sequence
  Description of Artificial Sequence: Synthetic polypeptide
NITNLCPFGEVFNATRFASVYAWNRKRISNCVADYSVLYNSASFSTFKCYGVSPTKLNDLCFTNVYADSFVIRGDEVRQIAPGQTGKIADYNYKLPDDFTGCVIAWNSNNLDSKVGGNYNYLYRLFRKSNLKPFERDISTEIYQAGSTPCNGVEGFNCYFPLQSYGFQPTNGVGYQPYRVVVLSFELLHAPATVCGPGSGGSGSSQCVNLTTRTQLPPAYTNSFTRGVYYPDKVFRSSVLHSTQDLFLPFFSNVTWFHAIHVSGTNGTKRFDNPVLPFNDGVYFASTEKSNIIRGWIFGTTLDSKTQSLLIVNNATNVVIKVCEFQFCNDPFLGVYYHKNNKSWMESEFRVYSSANNCTFEYVSQPFLMDLEGKQGNFKNLREFVFKNIDGYFKIYSKHTPINLVRDLPQGFSALEPLVDLPIGINITRFQTLLALHRSYLTPGDSSSGWTAGAAAYYVGYLQPRTFLLKYNENGTITDAVDCALDPLSETKCTLGSGGGGESQVRQQFSKDIEKLLNEQVNKEMQSSNLYMSMSSWCYTHSLDGAGLFLFDHAAEEYEHAKKLIIFLNENNVPVQLTSISAPEHKFEGLTQIFQKAYEHEQHISESINNIVDHAIKSKDHATFNFLQWYVAEQHEEEVLFKDILDKIELIGNENHGLYLADQYVKGIAKSRKSGS

SEQ ID NO: 190 - protein, 676 aa, Artificial Sequence
  Description of Artificial Sequence: Synthetic polypeptide
NITNLCPFGEVFNATRFASVYAWNRKRISNCVADYSVLYNSASFSTFKCYGVSPTKLNDLCFTNVYADSFVIRGDEVRQIAPGQTGKIADYNYKLPDDFTGCVIAWNSNNLDSKVGGNYNYLYRLFRKSNLKPFERDISTEIYQAGSTPCNGVEGFNCYRPLQSYGFQPTNGVGYQPYRVVVLSFELLHAPATVCGPGSGGSGSSQCVNLTTRTQLPPAYTNSFTRGVYYPDKVFRSSVLHSTQDLFLPFFSNVTWFHAIHVSGTNGTKRFDNPVLPFNDGVYFASTEKSNIIRGWIFGTTLDSKTQSLLIVNNATNVVIKVCEFQFCNDPFLGVYYHKNNKSWMESEFRVYSSANNCTFEYVSQPFLMDLEGKQGNFKNLREFVFKNIDGYFKIYSKHTPINLVRDLPQGFSALEPLVDLPIGINITRFQTLLALHRSYLTPGDSSSGWTAGAAAYYVGYLQPRTFLLKYNENGTITDAVDCALDPLSETKCTLGSGGGGESQVRQQFSKDIEKLLNEQVNKEMQSSNLYMSMSSWCYTHSLDGAGLFLFDHAAEEYEHAKKLIIFLNENNVPVQLTSISAPEHKFEGLTQIFQKAYEHEQHISESINNIVDHAIKSKDHATFNFLQWYVAEQHEEEVLFKDILDKIELIGNENHGLYLADQYVKGIAKSRKSGS

SEQ ID NO: 191 - protein, 676 aa, Artificial Sequence
  Description of Artificial Sequence: Synthetic polypeptide
NITNLCPFGEVFNATRFASVYAWNRKRISNCVADYSVLYNSASFSTFKCYGVSPTKLNDLCFTNVYADSFVIRGDEVRQIAPGQTGKIADYNYKLPDDFTGCVIAWNSNNLDSKVGGNYNYLYRLFRKSNLKPFERDISTEIYQAGSTPCNGVEGFNCYAPLQSYGFQPTNGVGYQPYRVVVLSFELLHAPATVCGPGSGGSGSSQCVNLTTRTQLPPAYTNSFTRGVYYPDKVFRSSVLHSTQDLFLPFFSNVTWFHAIHVSGTNGTKRFDNPVLPFNDGVYFASTEKSNIIRGWIFGTTLDSKTQSLLIVNNATNVVIKVCEFQFCNDPFLGVYYHKNNKSWMESEFRVYSSANNCTFEYVSQPFLMDLEGKQGNFKNLREFVFKNIDGYFKIYSKHTPINLVRDLPQGFSALEPLVDLPIGINITRFQTLLALHRSYLTPGDSSSGWTAGAAAYYVGYLQPRTFLLKYNENGTITDAVDCALDPLSETKCTLGSGGGGESQVRQQFSKDIEKLLNEQVNKEMQSSNLYMSMSSWCYTHSLDGAGLFLFDHAAEEYEHAKKLIIFLNENNVPVQLTSISAPEHKFEGLTQIFQKAYEHEQHISESINNIVDHAIKSKDHATFNFLQWYVAEQHEEEVLFKDILDKIELIGNENHGLYLADQYVKGIAKSRKSGS

SEQ ID NO: 192 - protein, 676 aa, Artificial Sequence
  Description of Artificial Sequence: Synthetic polypeptide
NITNLCPFGEVFNATRFASVYAWNRKRISNCVADYSVLYNSASFSTFKCYGVSPTKLNDLCFTNVYADSFVIRGDEVRQIAPGQTGKIADYNYKLPDDFTGCVIAWNSNNLDSKVGGNYNYLYRLFRKSNLKPFERDISTEIYQAGSTPCNGVEGFNCYFPLQSYGFQPTNGVGYQPYRVVVLSFENKSAPATVCGPGSGGSGSSQCVNLTTRTQLPPAYTNSFTRGVYYPDKVFRSSVLHSTQDLFLPFFSNVTWFHAIHVSGTNGTKRFDNPVLPFNDGVYFASTEKSNIIRGWIFGTTLDSKTQSLLIVNNATNVVIKVCEFQFCNDPFLGVYYHKNNKSWMESEFRVYSSANNCTFEYVSQPFLMDLEGKQGNFKNLREFVFKNIDGYFKIYSKHTPINLVRDLPQGFSALEPLVDLPIGINITRFQTLLALHRSYLTPGDSSSGWTAGAAAYYVGYLQPRTFLLKYNENGTITDAVDCALDPLSETKCTLGSGGGGESQVRQQFSKDIEKLLNEQVNKEMQSSNLYMSMSSWCYTHSLDGAGLFLFDHAAEEYEHAKKLIIFLNENNVPVQLTSISAPEHKFEGLTQIFQKAYEHEQHISESINNIVDHAIKSKDHATFNFLQWYVAEQHEEEVLFKDILDKIELIGNENHGLYLADQYVKGIAKSRKSGS

SEQ ID NO: 193 - protein, 676 aa, Artificial Sequence
  Description of Artificial Sequence: Synthetic polypeptide
NITNLCPFGEVFNATRFASVYAWNRKRISNCVADYSVLYNSASFSTFKCYGVSPTKLNDLCFTNVYADSFVIRGDEVRQIAPGQTGKIADYNYKLPDDFTGCVIAWNSNNLDSKVGGNYNYLYRLFRKSNLKPFERDISTEIYQAGSTPCNGVEGFNCYFPLQSYGFQPTNGVGYQPYRVVVLSFELRHAPATVCGPGSGGSGSSQCVNLTTRTQLPPAYTNSFTRGVYYPDKVFRSSVLHSTQDLFLPFFSNVTWFHAIHVSGTNGTKRFDNPVLPFNDGVYFASTEKSNIIRGWIFGTTLDSKTQSLLIVNNATNVVIKVCEFQFCNDPFLGVYYHKNNKSWMESEFRVYSSANNCTFEYVSQPFLMDLEGKQGNFKNLREFVFKNIDGYFKIYSKHTPINLVRDLPQGFSALEPLVDLPIGINITRFQTLLALHRSYLTPGDSSSGWTAGAAAYYVGYLQPRTFLLKYNENGTITDAVDCALDPLSETKCTLGSGGGGESQVRQQFSKDIEKLLNEQVNKEMQSSNLYMSMSSWCYTHSLDGAGLFLFDHAAEEYEHAKKLIIFLNENNVPVQLTSISAPEHKFEGLTQIFQKAYEHEQHISESINNIVDHAIKSKDHATFNFLQWYVAEQHEEEVLFKDILDKIELIGNENHGLYLADQYVKGIAKSRKSGS

SEQ ID NO: 194 - protein, 378 aa, Artificial Sequence
  Description of Artificial Sequence: Synthetic polypeptide
NITNLCPFGEVFNATRFASVYAWNRKRISNCVADYSVLYNSASFSTFKCYGVSPTKLNDLCFTNVYADSFVIRGDEVRQIAPGQTGKIADYNYKLPDDFTGCVIAWNSNNLDSKVGGNYNYLYRLFRKSNLKPFERDISTEIYQAGSTPCNGVEGFNCYAPLQSYGFQPTNGVGYQPYRVVVLSFENKSAPATVCGPGSGGGGESQVRQQFSKDIEKLLNEQVNKEMQSSNLYMSMSSWCYTHSLDGAGLFLFDHAAEEYEHAKKLIIFLNENNVPVQLTSISAPEHKFEGLTQIFQKAYEHEQHISESINNIVDHAIKSKDHATFNFLQWYVAEQHEEEVLFKDILDKIELIGNENHGLYLADQYVKGIAKSRKSGS

SEQ ID NO: 195 - protein, 378 aa, Artificial Sequence
  Description of Artificial Sequence: Synthetic polypeptide
NITNLCPFGEVFNATRFASVYAWNRKRISNCVADYSVLYNSASFSTFKCYGVSPTKLNDLCFTNVYADSFVIRGDEVRQIAPGQTGKIADYNYKLPDDFTGCVIAWNSNNLDSKVGGNYNYLYRLFRKSNLKPFERDISTEIYQAGSTPCNGVEGFNCYAPLQSYGFQPTNGVGYQPYRVVVLSFELRHAPATVCGPGSGGGGESQVRQQFSKDIEKLLNEQVNKEMQSSNLYMSMSSWCYTHSLDGAGLFLFDHAAEEYEHAKKLIIFLNENNVPVQLTSISAPEHKFEGLTQIFQKAYEHEQHISESINNIVDHAIKSKDHATFNFLQWYVAEQHEEEVLFKDILDKIELIGNENHGLYLADQYVKGIAKSRKSGS

SEQ ID NO: 196 - protein, 378 aa, Artificial Sequence
  Description of Artificial Sequence: Synthetic polypeptide
NITNLCPFGEVFNATRFASVYAWNRKRISNCVADYSVLYNSASFSTFKCYGVSPTKLNDLCFTNVYADSFVIRGDEVRQIAPGQTGKIADYNYKLPDDFTGCVIAWNSNNLDSKVGGNKNYLYRRFRKSNLKPFERDISTEIYQAGSTPCNGVEGFNCYRPLQSYGFQPTNGVGYQPYRVVVLSFENKSAPATVCGPGSGGGGESQVRQQFSKDIEKLLNEQVNKEMQSSNLYMSMSSWCYTHSLDGAGLFLFDHAAEEYEHAKKLIIFLNENNVPVQLTSISAPEHKFEGLTQIFQKAYEHEQHISESINNIVDHAIKSKDHATFNFLQWYVAEQHEEEVLFKDILDKIELIGNENHGLYLADQYVKGIAKSRKSGS

SEQ ID NO: 197 - protein, 378 aa, Artificial Sequence
  Description of Artificial Sequence: Synthetic polypeptide
NITNLCPFGEVFNATRFASVYAWNRKRISNCVADYSVLYNSASFSTFKCYGVSPTKLNDLCFTNVYADSFVIRGDEVRQIAPGQTGKIADYNYKLPDDFTGCVIAWNSNNLDSKVGGNKNYLYRRFRKSNLKPFERDISTEIYQAGSTPCNGVEGFNCYRPLQSYGFQPTNGVGYQPYRVVVLSFELRHAPATVCGPGSGGGGESQVRQQFSKDIEKLLNEQVNKEMQSSNLYMSMSSWCYTHSLDGAGLFLFDHAAEEYEHAKKLIIFLNENNVPVQLTSISAPEHKFEGLTQIFQKAYEHEQHISESINNIVDHAIKSKDHATFNFLQWYVAEQHEEEVLFKDILDKIELIGNENHGLYLADQYVKGIAKSRKSGS

SEQ ID NO: 198 - protein, 378 aa, Artificial Sequence
  Description of Artificial Sequence: Synthetic polypeptide
NITNLCPFGEVFNATRFASVYAWNRKRISNCVADYSVLYNSASFSTFKCYGVSPTKLNDLCFTNVYADSFVIRGDEVRQIAPGQTGKIADYNYKLPDDFTGCVIAWNSNNLDSKVGGNYNYLRRLFRKSNLKPFERDISTEIYQAGSTPCNGVEGFNCYFPLQSYGFQPTNGVGYQPYRVVVLSFENKSAPATVCGPGSGGGGESQVRQQFSKDIEKLLNEQVNKEMQSSNLYMSMSSWCYTHSLDGAGLFLFDHAAEEYEHAKKLIIFLNENNVPVQLTSISAPEHKFEGLTQIFQKAYEHEQHISESINNIVDHAIKSKDHATFNFLQWYVAEQHEEEVLFKDILDKIELIGNENHGLYLADQYVKGIAKSRKSGS

SEQ ID NO: 199 - protein, 378 aa, Artificial Sequence
  Description of Artificial Sequence: Synthetic polypeptide
NITNLCPFGEVFNATRFASVYAWNRKRISNCVADYSVLYNSASFSTFKCYGVSPTKLNDLCFTNVYADSFVIRGDEVRQIAPGQTGKIADYNYKLPDDFTGCVIAWNSNNLDSKVGGNYNYLRRLFRKSNLKPFERDISTEIYQAGSTPCNGVEGFNCYFPLQSYGFQPTNGVGYQPYRVVVLSFELRHAPATVCGPGSGGGGESQVRQQFSKDIEKLLNEQVNKEMQSSNLYMSMSSWCYTHSLDGAGLFLFDHAAEEYEHAKKLIIFLNENNVPVQLTSISAPEHKFEGLTQIFQKAYEHEQHISESINNIVDHAIKSKDHATFNFLQWYVAEQHEEEVLFKDILDKIELIGNENHGLYLADQYVKGIAKSRKSGS

SEQ ID NO: 200 - protein, 378 aa, Artificial Sequence
  Description of Artificial Sequence: Synthetic polypeptide
NITNLCPFGEVFNATRFASVYAWNRKRISNCVADYSVLYNSASFSTFKCYGVSPTKLNDLCFTNVYADSFVIRGDEVRQIAPGQTGKIADYNYKLPDDFTGCVIAWNSNNLDSKVGGNKNYLYRRFRKSNLKPFERDISTEIYQAGSTPCNGVEGFNCYRPLQSYGFQPTNGVGYQPYRVVVLSFELLHAPATVCGPGSGGGGESQVRQQFSKDIEKLLNEQVNKEMQSSNLYMSMSSWCYTHSLDGAGLFLFDHAAEEYEHAKKLIIFLNENNVPVQLTSISAPEHKFEGLTQIFQKAYEHEQHISESINNIVDHAIKSKDHATFNFLQWYVAEQHEEEVLFKDILDKIELIGNENHGLYLADQYVKGIAKSRKSGS

SEQ ID NO: 201 - protein, 378 aa, Artificial Sequence
  Description of Artificial Sequence: Synthetic polypeptide
NITNLCPFGEVFNATRFASVYAWNRKRISNCVADYSVLYNSASFSTFKCYGVSPTKLNDLCFTNVYADSFVIRGDEVRQIAPGQTGKIADYNYKLPDDFTGCVIAWNSNNLDSKVGGNYNYLYRRFRKSNLKPFERDISTEIYQAGSTPCNGVEGFNCYFPLQSYGFQPTNGVGYQPYRVVVLSFELLHAPATVCGPGSGGGGESQVRQQFSKDIEKLLNEQVNKEMQSSNLYMSMSSWCYTHSLDGAGLFLFDHAAEEYEHAKKLIIFLNENNVPVQLTSISAPEHKFEGLTQIFQKAYEHEQHISESINNIVDHAIKSKDHATFNFLQWYVAEQHEEEVLFKDILDKIELIGNENHGLYLADQYVKGIAKSRKSGS

SEQ ID NO: 202 - protein, 378 aa, Artificial Sequence
  Description of Artificial Sequence: Synthetic polypeptide
NITNLCPFGEVFNATRFASVYAWNRKRISNCVADYSVLYNSASFSTFKCYGVSPTKLNDLCFTNVYADSFVIRGDEVRQIAPGQTGKIADYNYKLPDDFTGCVIAWNSNNLDSKVGGNYNYLYRLFRKSNLKPFERDRSTEIYQAGSTPCNGVEGFNCYFPLQSYGFQPTNGVGYQPYRVVVLSFELLHAPATVCGPGSGGGGESQVRQQFSKDIEKLLNEQVNKEMQSSNLYMSMSSWCYTHSLDGAGLFLFDHAAEEYEHAKKLIIFLNENNVPVQLTSISAPEHKFEGLTQIFQKAYEHEQHISESINNIVDHAIKSKDHATFNFLQWYVAEQHEEEVLFKDILDKIELIGNENHGLYLADQYVKGIAKSRKSGS

SEQ ID NO: 203 - protein, 378 aa, Artificial Sequence
  Description of Artificial Sequence: Synthetic polypeptide
NITNLCPFGEVFNATRFASVYAWNRKRISNCVADYSVLYNSASFSTFKCYGVSPTKLNDLCFTNVYADSFVIRGDEVRQIAPGQTGKIADYNYKLPDDFTGCVIAWNSNNLDSKVGGNYNYLRRLFRKSNLKPFERDISTEIYQAGSTPCNGVEGFNCYFPLQSYGFQPTNGVGYQPYRVVVLSFELLHAPATVCGPGSGGGGESQVRQQFSKDIEKLLNEQVNKEMQSSNLYMSMSSWCYTHSLDGAGLFLFDHAAEEYEHAKKLIIFLNENNVPVQLTSISAPEHKFEGLTQIFQKAYEHEQHISESINNIVDHAIKSKDHATFNFLQWYVAEQHEEEVLFKDILDKIELIGNENHGLYLADQYVKGIAKSRKSGS

SEQ ID NO: 204 - protein, 378 aa, Artificial Sequence
  Description of Artificial Sequence: Synthetic polypeptide
NITNLCPFGEVFNATRFASVYAWNRKRISNCVADYSVLYNSASFSTFKCYGVSPTKLNDLCFTNVYADSFVIRGDEVRQIAPGQTGKIADYNYKLPDDFTGCVIAWNSNNLDSKVGGNYNYRYRLFRKSNLKPFERDISTEIYQAGSTPCNGVEGFNCYFPLQSYGFQPTNGVGYQPYRVVVLSFELLHAPATVCGPGSGGGGESQVRQQFSKDIEKLLNEQVNKEMQSSNLYMSMSSWCYTHSLDGAGLFLFDHAAEEYEHAKKLIIFLNENNVPVQLTSISAPEHKFEGLTQIFQKAYEHEQHISESINNIVDHAIKSKDHATFNFLQWYVAEQHEEEVLFKDILDKIELIGNENHGLYLADQYVKGIAKSRKSGS

SEQ ID NO: 205 - protein, 378 aa, Artificial Sequence
  Description of Artificial Sequence: Synthetic polypeptide
NITNLCPFGEVFNATRFASVYAWNRKRISNCVADYSVLYNSASFSTFKCYGVSPTKLNDLCFTNVYADSFVIRGDEVRQIAPGQTGKIADYNYKLPDDFTGCVIAWNSNNLDSKVGGNYNYLYRLFRKSNLKPFERDISTEIYQAGSTPCNGVEGFNCYFPRQSYGFQPTNGVGYQPYRVVVLSFELLHAPATVCGPGSGGGGESQVRQQFSKDIEKLLNEQVNKEMQSSNLYMSMSSWCYTHSLDGAGLFLFDHAAEEYEHAKKLIIFLNENNVPVQLTSISAPEHKFEGLTQIFQKAYEHEQHISESINNIVDHAIKSKDHATFNFLQWYVAEQHEEEVLFKDILDKIELIGNENHGLYLADQYVKGIAKSRKSGS

SEQ ID NO: 206 - protein, 378 aa, Artificial Sequence
  Description of Artificial Sequence: Synthetic polypeptide
NITNLCPFGEVFNATRFASVYAWNRKRISNCVADYSVLYNSASFSTFKCYGVSPTKLNDLCFTNVYADSFVIRGDEVRQIAPGQTGKIADYNYKLPDDFTGCVIAWNSNNLDSKVGGNYNYLYRLFRKSNLKPFERDISTEIYQAGSTPCNGVEGFNCYRPLQSYGFQPTNGVGYQPYRVVVLSFELLHAPATVCGPGSGGGGESQVRQQFSKDIEKLLNEQVNKEMQSSNLYMSMSSWCYTHSLDGAGLFLFDHAAEEYEHAKKLIIFLNENNVPVQLTSISAPEHKFEGLTQIFQKAYEHEQHISESINNIVDHAIKSKDHATFNFLQWYVAEQHEEEVLFKDILDKIELIGNENHGLYLADQYVKGIAKSRKSGS

SEQ ID NO: 207 - protein, 378 aa, Artificial Sequence
  Description of Artificial Sequence: Synthetic polypeptide
NITNLCPFGEVFNATRFASVYAWNRKRISNCVADYSVLYNSASFSTFKCYGVSPTKLNDLCFTNVYADSFVIRGDEVRQIAPGQTGKIADYNYKLPDDFTGCVIAWNSNNLDSKVGGNYNYLYRLFRKSNLKPFERDISTEIYQAGSTPCNGVEGFNCYAPLQSYGFQPTNGVGYQPYRVVVLSFELLHAPATVCGPGSGGGGESQVRQQFSKDIEKLLNEQVNKEMQSSNLYMSMSSWCYTHSLDGAGLFLFDHAAEEYEHAKKLIIFLNENNVPVQLTSISAPEHKFEGLTQIFQKAYEHEQHISESINNIVDHAIKSKDHATFNFLQWYVAEQHEEEVLFKDILDKIELIGNENHGLYLADQYVKGIAKSRKSGS

SEQ ID NO: 208 - protein, 378 aa, Artificial Sequence
  Description of Artificial Sequence: Synthetic polypeptide
NITNLCPFGEVFNATRFASVYAWNRKRISNCVADYSVLYNSASFSTFKCYGVSPTKLNDLCFTNVYADSFVIRGDEVRQIAPGQTGKIADYNYKLPDDFTGCVIAWNSNNLDSKVGGNYNYLYRLFRKSNLKPFERDISTEIYQAGSTPCNGVEGFNCYFPLQSYGFQPTNGVGYQPYRVVVLSFENKSAPATVCGPGSGGGGESQVRQQFSKDIEKLLNEQVNKEMQSSNLYMSMSSWCYTHSLDGAGLFLFDHAAEEYEHAKKLIIFLNENNVPVQLTSISAPEHKFEGLTQIFQKAYEHEQHISESINNIVDHAIKSKDHATFNFLQWYVAEQHEEEVLFKDILDKIELIGNENHGLYLADQYVKGIAKSRKSGS

SEQ ID NO: 209 - protein, 378 aa, Artificial Sequence
  Description of Artificial Sequence: Synthetic polypeptide
NITNLCPFGEVFNATRFASVYAWNRKRISNCVADYSVLYNSASFSTFKCYGVSPTKLNDLCFTNVYADSFVIRGDEVRQIAPGQTGKIADYNYKLPDDFTGCVIAWNSNNLDSKVGGNYNYLYRLFRKSNLKPFERDISTEIYQAGSTPCNGVEGFNCYFPLQSYGFQPTNGVGYQPYRVVVLSFELRHAPATVCGPGSGGGGESQVRQQFSKDIEKLLNEQVNKEMQSSNLYMSMSSWCYTHSLDGAGLFLFDHAAEEYEHAKKLIIFLNENNVPVQLTSISAPEHKFEGLTQIFQKAYEHEQHISESINNIVDHAIKSKDHATFNFLQWYVAEQHEEEVLFKDILDKIELIGNENHGLYLADQYVKGIAKSRKSGS

SEQ ID NO: 210 - protein, 378 aa, Artificial Sequence
  Description of Artificial Sequence: Synthetic polypeptide
NITNNCPFGEVFNATRFASVYAWNRKRISNCVADYSTLYNSASFSTFKCYGVSPTKLNDLCFTNVYADSFVIRGDEVRQIAPGQTGKIADYNYKLPDDFTGCVIAWNSNNLDSKVGGNYNYLYRLFRKSNLKPFERDISTEIYQAGSTPCNGVEGFNCYFPLQSYGFQPTNGVGYQPYRVVVLSFELLHAPATVCGPGSGGGGESQVRQQFSKDIEKLLNEQVNKEMQSSNLYMSMSSWCYTHSLDGAGLFLFDHAAEEYEHAKKLIIFLNENNVPVQLTSISAPEHKFEGLTQIFQKAYEHEQHISESINNIVDHAIKSKDHATFNFLQWYVAEQHEEEVLFKDILDKIELIGNENHGLYLADQYVKGIAKSRKSGS

SEQ ID NO: 211 - protein, 378 aa, Artificial Sequence
  Description of Artificial Sequence: Synthetic polypeptide
NITNLCPFGEVFNATRFASVYAWNRKRISNCVADYSVLYNSASFSTFKCYGVSPNKTNDLCFTNVYADSFVIRGDEVRQIAPGQTGKIADYNYKLPDDFTGCVIAWNSNNLDSKVGGNYNYLYRLFRKSNLKPFERDISTEIYQAGSTPCNGVEGFNCYFPLQSYGFQPTNGVGYQPYRVVVLSFELLHAPATVCGPGSGGGGESQVRQQFSKDIEKLLNEQVNKEMQSSNLYMSMSSWCYTHSLDGAGLFLFDHAAEEYEHAKKLIIFLNENNVPVQLTSISAPEHKFEGLTQIFQKAYEHEQHISESINNIVDHAIKSKDHATFNFLQWYVAEQHEEEVLFKDILDKIELIGNENHGLYLADQYVKGIAKSRKSGS

SEQ ID NO: 212 - protein, 378 aa, Artificial Sequence
  Description of Artificial Sequence: Synthetic polypeptide
NITNLCPFGEVFNATRFASVYAWNRKRISNCVADYSVLYNSASFSTFKCYGRSPTKLNDLCFTNVYADSFVIRGDEVRQIAPGQTGKIADYNYKLPDDFTGCVIAWNSNNLDSKVGGNYNYLYRLFRKSNLKPFERDISTEIYQAGSTPCNGVEGFNCYFPLQSYGFQPTNGVGYQPYRVVVLSFELLHAPATVCGPGSGGGGESQVRQQFSKDIEKLLNEQVNKEMQSSNLYMSMSSWCYTHSLDGAGLFLFDHAAEEYEHAKKLIIFLNENNVPVQLTSISAPEHKFEGLTQIFQKAYEHEQHISESINNIVDHAIKSKDHATFNFLQWYVAEQHEEEVLFKDILDKIELIGNENHGLYLADQYVKGIAKSRKSGS

SEQ ID NO: 213 - protein, 378 aa, Artificial Sequence
  Description of Artificial Sequence: Synthetic polypeptide
NITNLCPFGEVFNATRFASVYAWNRKRISNCVADYSVLYNSASFSTRKCYGVSPTKLNDLCFTNVYADSFVIRGDEVRQIAPGQTGKIADYNYKLPDDFTGCVIAWNSNNLDSKVGGNYNYLYRLFRKSNLKPFERDISTEIYQAGSTPCNGVEGFNCYFPLQSYGFQPTNGVGYQPYRVVVLSFELLHAPATVCGPGSGGGGESQVRQQFSKDIEKLLNEQVNKEMQSSNLYMSMSSWCYTHSLDGAGLFLFDHAAEEYEHAKKLIIFLNENNVPVQLTSISAPEHKFEGLTQIFQKAYEHEQHISESINNIVDHAIKSKDHATFNFLQWYVAEQHEEEVLFKDILDKIELIGNENHGLYLADQYVKGIAKSRKSGS

SEQ ID NO: 214 - protein, 482 aa, Artificial Sequence
  Description of Artificial Sequence: Synthetic polypeptide
ITNLCPFGEVFNATRFASVYAWNRKRISNCVADYSVLYNSASFSTFKCYGVSPTKLNDLCFTNVYADSFVIRGDEVRQIAPGQTGKIADYNYKLPDDFTGCVIAWNSNNLDSKVGGNYNYLYRLFRKSNLKPFERDISTEIYQAGSTPCNGVEGFNCYFPLQSYGFQPTNGVGYQPYRVVVLSFELLHAPATVCGQPTESIVRFPNPKKSTNLVKNKCVNFNFNGLTGTGVLTESNKKFLPFQQFGRDIADTTDAVRDPQTLEILDITPCSAYTNSFTRGVYYPDKVFRSSVLHSTQDLFLPFFSNVTWFHDNPVLPFNDGVYFASTNIIRGWIFGTTLDSKTQSLLIVNNATNVVIKVCEFQFCNDPFFRVYSSANNCTFEYVSQPFLKNLREFVFKNIDGYFKIYSKHTPINLVRDLPQGFSALEPLVDLPIGINITRFQTLLALHGAAAYYVGYLQPRTFLLKYNENGTITDAVDCALD

SEQ ID NO: 215 - protein, 613 aa, Artificial Sequence
  Description of Artificial Sequence: Synthetic polypeptide
KPSGSVVEQAEGVECDFSPLLSGTPPQVYNFKRLVFTNCNYNLTKLLSLFSVNDFTCSQISPAAIASNCYSSLILDYFSYPLSMKSDLSVSSAGPISQFNYKQSFSNPTCLILATVPHNLTTITKPLKYSYINKCSRLLSDDRTEVPQLVNANQYSPCVSIVPSTVWEDGDYYRKQLSPLEGGGWLVASGSTVAMTEQLQMGFGITVQYGTDTNSVCPKLEFANDTKIASQLGNCVEYSLYGVSGRGVFQNCTAVGVRQQRFVYDAYQNLVGYYSDDGNYVDVGPDSVKSACIEVDIQQTFFDKTWPRPIDVSKADGIIYPQGRTYSNITITYQGLFPYQGDHGDMYVYSAGHATGTTPQKLFVANYSQDVKQFANGFVVRIGAAANSTGTVIISPSTSATIRKIYPAFMLGSSVGNFSDGKMGRFFNHTLVLLPDGCGTLLRAFYCILEPRSGNHCPAGNSYTSFATYHTPATDCSDGNYNRNASLNSFKEYFNLRNCTFMYTYNITEDEILEWFGITQTAQGVHLFSSRYVDLYGGNMFQFATLPVYDTIKYYSIIPHSIRSIQSDRKAWAAFYVYKLQPLTFLLDFSVDGYIRRAIDCGFNDLSQLHCSY

SEQ ID NO: 216 - protein, 531 aa, Artificial Sequence
  Description of Artificial Sequence: Synthetic polypeptide
RVVPSGDVVRFPNITNLCPFGEVFNATKFPSVYAWERKKISNCVADYSVLYNSTFFSTFKCYGVSATKLNDLCFSNVYADSFVVKGDDVRQIAPGQTGVIADYNYKLPDDFMGCVLAWNTRNIDATSTGNYNYKYRYLRHGKLRPFERDISNVPFSPDGKPCTPPALNCYWPLNDYGFYTTTGIGYQPYRVVVLSFELLNAPATVCGPKLSTDLIKNQCVNFNFNGLTGTGVLTPSSKRFQPFQQFGRDVSDFTDSVRDPKTSEILDISPCSRCTTFDDVQAPNYTQHTSSMRGVYYPDEIFRSDTLYLTQDLFLPFYSNVTGFHTINHTFDNPVIPFKDGIYFAATEKSNVVRGWVFGSTMNNKSQSVIIINNSTNVVIRACNFELCDNPFFAVSKPMGTQTHTMIFDNAFNCTFEYISDAFSLDVSEKSGNFKHLREFVFKNKDGFLYVYKGYQPIDVVRDLPSGFNTLKPIFKLPLGINITNFRAILTAFSTWGTSAAAYFVGYLKPTTFMLKYDENGTITDAVDCSQ

SEQ ID NO: 217 - protein, 396 aa, Artificial Sequence
  Description of Artificial Sequence: Synthetic polypeptide
HHHHHHHHGPLEVLFQGPNITNLCPFGEVFNATRFASVYAWNRKRISNCVADYSVLYNSASFSTFKCYGVSPTKLNDLCFTNVYADSFVIRGDEVRQIAPGQTGKIADYNYKLPDDFTGCVIAWNSNNLDSKVGGNYNYLRRLFRKSNLKPFERDISTEIYQAGSTPCNGVEGFNCYFPLQSYGFQPTYGVGYQPYRVVVLSFENKSAPATVCGPGSGGGGESQVRQQFSKDIEKLLNEQVNKEMQSSNLYMSMSSWCYTHSLDGAGLFLFDHAAEEYEHAKKLIIFLNENNVPVQLTSISAPEHKFEGLTQIFQKAYEHEQHISESINNIVDHAIKSKDHATFNFLQWYVAEQHEEEVLFKDILDKIELIGNENHGLYLADQYVKGIAKSRKSGS

SEQ ID NO: 218 - protein, 396 aa, Artificial Sequence
  Description of Artificial Sequence: Synthetic polypeptide
HHHHHHHHGPLEVLFQGPNITNLCPFGEVFNATRFASVYAWNRKRISNCVADYSVLYNSASFSTFKCYGVSPTKLNDLCFTNVYADSFVIRGDEVRQIAPGQTGNIADYNYKLPDDFTGCVIAWNSNNLDSKVGGNYNYLRRLFRKSNLKPFERDISTEIYQAGSTPCNGVKGFNCYFPLQSYGFQPTYGVGYQPYRVVVLSFENKSAPATVCGPGSGGGGESQVRQQFSKDIEKLLNEQVNKEMQSSNLYMSMSSWCYTHSLDGAGLFLFDHAAEEYEHAKKLIIFLNENNVPVQLTSISAPEHKFEGLTQIFQKAYEHEQHISESINNIVDHAIKSKDHATFNFLQWYVAEQHEEEVLFKDILDKIELIGNENHGLYLADQYVKGIAKSRKSGS

SEQ ID NO: 219 - protein, 396 aa, Artificial Sequence
  Description of Artificial Sequence: Synthetic polypeptide
HHHHHHHHGPLEVLFQGPNITNLCPFGEVFNATRFASVYAWNRKRISNCVADYSVLYNSASFSTFKCYGVSPTKLNDLCFTNVYADSFVIRGDEVRQIAPGQTGTIADYNYKLPDDFTGCVIAWNSNNLDSKVGGNYNYLRRLFRKSNLKPFERDISTEIYQAGSTPCNGVKGFNCYFPLQSYGFQPTYGVGYQPYRVVVLSFENKSAPATVCGPGSGGGGESQVRQQFSKDIEKLLNEQVNKEMQSSNLYMSMSSWCYTHSLDGAGLFLFDHAAEEYEHAKKLIIFLNENNVPVQLTSISAPEHKFEGLTQIFQKAYEHEQHISESINNIVDHAIKSKDHATFNFLQWYVAEQHEEEVLFKDILDKIELIGNENHGLYLADQYVKGIAKSRKSGS

SEQ ID NO: 220 - protein, 853 aa, Artificial Sequence
  Description of Artificial Sequence: Synthetic polypeptide
SSQCVNLTTRTQLPPAYTNSFTRGVYYPDKVFRSSVLHSTQDLFLPFFSNVTWFHAISGTNGTKRFDNPVLPFNDGVYFASTEKSNIIRGWIFGTTLDSKTQSLLIVNNATNVVIKVCEFQFCNDPFLGVYHKNNKSWMESEFRVYSSANNCTFEYVSQPFLMDLEGKQGNFKNLREFVFKNIDGYFKIYSKHTPINLVRDLPQGFSALEPLVDLPIGINITRFQTLLALHRSYLTPGDSSSGWTAGAAAYYVGYLQPRTFLLKYNENGTITDAVDCALDPLSETKCTLKSFTVEKGIYQTSNFRVQPTESIVRFPNITNLCPFGEVFNATRFASVYAWNRKRISNCVADYSVLYNSASFSTFKCYGVSPTKLNDLCFTNVYADSFVIRGDEVRQIAPGQTGKIADYNYKLPDDFTGCVIAWNSNNLDSKVGGNYNYLYRLFRKSNLKPFERDISTEIYQAGSTPCNGVEGFNCYFPLQSYGFQPTYGVGYQPYRVVVLSFELLHAPATVCGPKKSTNLVKNKCVNFNFNGLTGTGVLTESNKKFLPFQQFGRDIDDTTDAVRDPQTLEILDITPCSFGGVSVITPGTNTSNQVAVLYQGVNCTEVPVAIHADQLTPTWRVYSTGSNVFQTRAGCLIGAEHVNNSYECDIPIGAGICASYQTGGSQSIIAYTGSGGGGESQVRQQFSKDIEKLLNEQVNKEMQSSNLYMSMSSWCYTHSLDGAGLFLFDHAAEEYEHAKKLIIFLNENNVPVQLTSISAPEHKFEGLTQIFQKAYEHEQHISESINNIVDHAIKSKDHATFNFLQWYVAEQHEEEVLFKDILDKIELIGNENHGLYLADQYVKGIAKSRKSGS

SEQ ID NO: 221 - protein, 853 aa, Artificial Sequence
  Description of Artificial Sequence: Synthetic polypeptide
SSQCVNFTTRTQLPPAYTNSFTRGVYYPDKVFRSSVLHSTQDLFLPFFSNVTWFHAIHVSGTNGTKRFANPVLPFNDGVYFASTEKSNIIRGWIFGTTLDSKTQSLLIVNNATNVVIKVCEFQFCNDPFLGVYYHKNNKSWMESEFRVYSSANNCTFEYVSQPFLMDLEGKQGNFKNLREFVFKNIDGYFKIYSKHTPINLVRGLPQGFSALEPLVDLPIGINITRFQTLHISYLTPGDSSSGWTAGAAAYYVGYLQPRTFLLKYNENGTITDAVDCALDPLSETKCTLKSFTVEKGIYQTSNFRVQPTESIVRFPNITNLCPFGEVFNATRFASVYAWNRKRISNCVADYSVLYNSASFSTFKCYGVSPTKLNDLCFTNVYADSFVIRGDEVRQIAPGQTGNIADYNYKLPDDFTGCVIAWNSNNLDSKVGGNYNYLYRLFRKSNLKPFERDISTEIYQAGSTPCNGVKGFNCYFPLQSYGFQPTYGVGYQPYRVVVLSFELLHAPATVCGPKKSTNLVKNKCVNFNFNGLTGTGVLTESNKKFLPFQQFGRDIADTTDAVRDPQTLEILDITPCSFGGVSVITPGTNTSNQVAVLYQGVNCTEVPVAIHADQLTPTWRVYSTGSNVFQTRAGCLIGAEHVNNSYECDIPIGAGICASYQTGGSQSIIAYTGSGGGGESQVRQQFSKDIEKLLNEQVNKEMQSSNLYMSMSSWCYTHSLDGAGLFLFDHAAEEYEHAKKLIIFLNENNVPVQLTSISAPEHKFEGLTQIFQKAYEHEQHISESINNIVDHAIKSKDHATFNFLQWYVAEQHEEEVLFKDILDKIELIGNENHGLYLADQYVKGIAKSRKSGS

SEQ ID NO: 222 - protein, 853 aa, Artificial Sequence
  Description of Artificial Sequence: Synthetic polypeptide
SSQCVNFTTRTQLPPAYTNSFTRGVYYPDKVFRSSVLHSTQDLFLPFFSNVTWFHAIHVSGTNGTKRFDNPVLPFNDGVYFASTEKSNIIRGWIFGTTLDSKTQSLLIVNNATNVVIKVCEFQFCNDPFLGVYYHKNNKSWMESEFRVYSSANNCTFEYVSQPFLMDLEGKQGNFKNLREFVFKNIDGYFKIYSKHTPINLVRGLPQGFSALEPLVDLPIGINITRFQTLHISYLTPGDSSSGWTAGAAAYYVGYLQPRTFLLKYNENGTITDAVDCALDPLSETKCTLKSFTVEKGIYQTSNFRVQPTESIVRFPNITNLCPFGEVFNATRFASVYAWNRKRISNCVADYSVLYNSASFSTFKCYGVSPTKLNDLCFTNVYADSFVIRGDEVRQIAPGQTGNIADYNYKLPDDFTGCVIAWNSNNLDSKVGGNYNYLYRLFRKSNLKPFERDISTEIYQAGSTPCNGVKGFNCYFPLQSYGFQPTYGVGYQPYRVVVLSFELLHAPATVCGPKKSTNLVKNKCVNFNFNGLTGTGVLTESNKKFLPFQQFGRDIADTTDAVRDPQTLEILDITPCSFGGVSVITPGTNTSNQVAVLYQGVNCTEVPVAIHADQLTPTWRVYSTGSNVFQTRAGCLIGAEHVNNSYECDIPIGAGICASYQTGGSQSIIAYTGSGGGGESQVRQQFSKDIEKLLNEQVNKEMQSSNLYMSMSSWCYTHSLDGAGLFLFDHAAEEYEHAKKLIIFLNENNVPVQLTSISAPEHKFEGLTQIFQKAYEHEQHISESINNIVDHAIKSKDHATFNFLQWYVAEQHEEEVLFKDILDKIELIGNENHGLYLADQYVKGIAKSRKSGS

SEQ ID NO: 223 - protein, 853 aa, Artificial Sequence
  Description of Artificial Sequence: Synthetic polypeptide
SSQCVNFTTRTQLPPAYTNSFTRGVYYPDKVFRSSVLHSTQDLFLPFFSNVTWFHAIHVSGTNGTKRFANPVLPFNDGVYFASTEKSNIIRGWIFGTTLDSKTQSLLIVNNATNVVIKVCEFQFCNDPFLGVYYHKNNKSWMESEFRVYSSANNCTFEYVSQPFLMDLEGKQGNFKNLREFVFKNIDGYFKIYSKHTPINLVRDLPQGFSALEPLVDLPIGINITRFQTLHISYLTPGDSSSGWTAGAAAYYVGYLQPRTFLLKYNENGTITDAVDCALDPLSETKCTLKSFTVEKGIYQTSNFRVQPTESIVRFPNITNLCPFGEVFNATRFASVYAWNRKRISNCVADYSVLYNSASFSTFKCYGVSPTKLNDLCFTNVYADSFVIRGDEVRQIAPGQTGNIADYNYKLPDDFTGCVIAWNSNNLDSKVGGNYNYLYRLFRKSNLKPFERDISTEIYQAGSTPCNGVKGFNCYFPLQSYGFQPTYGVGYQPYRVVVLSFELLHAPATVCGPKKSTNLVKNKCVNFNFNGLTGTGVLTESNKKFLPFQQFGRDIADTTDAVRDPQTLEILDITPCSFGGVSVITPGTNTSNQVAVLYQGVNCTEVPVAIHADQLTPTWRVYSTGSNVFQTRAGCLIGAEHVNNSYECDIPIGAGICASYQTGGSQSIIAYTGSGGGGESQVRQQFSKDIEKLLNEQVNKEMQSSNLYMSMSSWCYTHSLDGAGLFLFDHAAEEYEHAKKLIIFLNENNVPVQLTSISAPEHKFEGLTQIFQKAYEHEQHISESINNIVDHAIKSKDHATFNFLQWYVAEQHEEEVLFKDILDKIELIGNENHGLYLADQYVKGIAKSRKSGS

SEQ ID NO: 224 - protein, 856 aa, Artificial Sequence
  Description of Artificial Sequence: Synthetic polypeptide
SSQCVNFTNRTQLPSAYTNSFTRGVYYPDKVFRSSVLHSTQDLFLPFFSNVTWFHAIHVSGTNGTKRFDNPVLPFNDGVYFASTEKSNIIRGWIFGTTLDSKTQSLLIVNNATNVVIKVCEFQFCNYPFLGVYYHKNNKSWMESEFRVYSSANNCTFEYVSQPFLMDLEGKQGNFKNLSEFVFKNIDGYFKIYSKHTPINLVRDLPQGFSALEPLVDLPIGINITRFQTLLALHRSYLTPGDSSSGWTAGAAAYYVGYLQPRTFLLKYNENGTITDAVDCALDPLSETKCTLKSFTVEKGIYQTSNFRVQPTESIVRFPNITNLCPFGEVFNATRFASVYAWNRKRISNCVADYSVLYNSASFSTFKCYGVSPTKLNDLCFTNVYADSFVIRGDEVRQIAPGQTGTIADYNYKLPDDFTGCVIAWNSNNLDSKVGGNYNYLYRLFRKSNLKPFERDISTEIYQAGSTPCNGVKGFNCYFPLQSYGFQPTYGVGYQPYRVVVLSFELLHAPATVCGPKKSTNLVKNKCVNFNFNGLTGTGVLTESNKKFLPFQQFGRDIADTTDAVRDPQTLEILDITPCSFGGVSVITPGTNTSNQVAVLYQGVNCTEVPVAIHADQLTPTWRVYSTGSNVFQTRAGCLIGAEYVNNSYECDIPIGAGICASYQTGGSQSIIAYTGSGGGGESQVRQQFSKDIEKLLNEQVNKEMQSSNLYMSMSSWCYTHSLDGAGLFLFDHAAEEYEHAKKLIIFLNENNVPVQLTSISAPEHKFEGLTQIFQKAYEHEQHISESINNIVDHAIKSKDHATFNFLQWYVAEQHEEEVLFKDILDKIELIGNENHGLYLADQYVKGIAKSRKSGS

SEQ ID NO: 225 - protein, 691 aa, Artificial Sequence
  Description of Artificial Sequence: Synthetic polypeptide
HHHHHHHHGPLEVLFQGPNITNLCPFGEVFNATRFASVYAWNRKRISNCVADYSVLYNSASFSTFKCYGVSPTKLNDLCFTNVYADSFVIRGDEVRQIAPGQTGKIADYNYKLPDDFTGCVIAWNSNNLDSKVGGNYNYLRRLFRKSNLKPFERDISTEIYQAGSTPCNGVEGFNCYFPLQSYGFQPTYGVGYQPYRVVVLSFENKSAPATVCGPGSGGSGSSQCVNLTTRTQLPPAYTNSFTRGVYYPDKVFRSSVLHSTQDLFLPFFSNVTWFHAISGTNGTKRFDNPVLPFNDGVYFASTEKSNIIRGWIFGTTLDSKTQSLLIVNNATNVVIKVCEFQFCNDPFLGVYHKNNKSWMESEFRVYSSANNCTFEYVSQPFLMDLEGKQGNFKNLREFVFKNIDGYFKIYSKHTPINLVRDLPQGFSALEPLVDLPIGINITRFQTLLALHRSYLTPGDSSSGWTAGAAAYYVGYLQPRTFLLKYNENGTITDAVDCALDPLSETKCTLGSGGGGESQVRQQFSKDIEKLLNEQVNKEMQSSNLYMSMSSWCYTHSLDGAGLFLFDHAAEEYEHAKKLIIFLNENNVPVQLTSISAPEHKFEGLTQIFQKAYEHEQHISESINNIVDHAIKSKDHATFNFLQWYVAEQHEEEVLFKDILDKIELIGNENHGLYLADQYVKGIAKSRKSGS

SEQ ID NO: 226 - protein, 691 aa, Artificial Sequence
  Description of Artificial Sequence: Synthetic polypeptide
HHHHHHHHGPLEVLFQGPNITNLCPFGEVFNATRFASVYAWNRKRISNCVADYSVLYNSASFSTFKCYGVSPTKLNDLCFTNVYADSFVIRGDEVRQIAPGQTGNIADYNYKLPDDFTGCVIAWNSNNLDSKVGGNYNYLRRLFRKSNLKPFERDISTEIYQAGSTPCNGVKGFNCYFPLQSYGFQPTYGVGYQPYRVVVLSFENKSAPATVCGPGSGGSGSSQCVNFTTRTQLPPAYTNSFTRGVYYPDKVFRSSVLHSTQDLFLPFFSNVTWFHAIHVSGTNGTKRFANPVLPFNDGVYFASTEKSNIIRGWIFGTTLDSKTQSLLIVNNATNVVIKVCEFQFCNDPFLGVYYHKNNKSWMESEFRVYSSANNCTFEYVSQPFLMDLEGKQGNFKNLREFVFKNIDGYFKIYSKHTPINLVRGLPQGFSALEPLVDLPIGINITRFQTLHISYLTPGDSSSGWTAGAAAYYVGYLQPRTFLLKYNENGTITDAVDCALDPLSETKCTLGSGGGGESQVRQQFSKDIEKLLNEQVNKEMQSSNLYMSMSSWCYTHSLDGAGLFLFDHAAEEYEHAKKLIIFLNENNVPVQLTSISAPEHKFEGLTQIFQKAYEHEQHISESINNIVDHAIKSKDHATFNFLQWYVAEQHEEEVLFKDILDKIELIGNENHGLYLADQYVKGIAKSRKSGS

SEQ ID NO: 227 - protein, 691 aa, Artificial Sequence
  Description of Artificial Sequence: Synthetic polypeptide
HHHHHHHHGPLEVLFQGPNITNLCPFGEVFNATRFASVYAWNRKRISNCVADYSVLYNSASFSTFKCYGVSPTKLNDLCFTNVYADSFVIRGDEVRQIAPGQTGNIADYNYKLPDDFTGCVIAWNSNNLDSKVGGNYNYLRRLFRKSNLKPFERDISTEIYQAGSTPCNGVKGFNCYFPLQSYGFQPTYGVGYQPYRVVVLSFENKSAPATVCGPGSGGSGSSQCVNFTTRTQLPPAYTNSFTRGVYYPDKVFRSSVLHSTQDLFLPFFSNVTWFHAIHVSGTNGTKRFDNPVLPFNDGVYFASTEKSNIIRGWIFGTTLDSKTQSLLIVNNATNVVIKVCEFQFCNDPFLGVYYHKNNKSWMESEFRVYSSANNCTFEYVSQPFLMDLEGKQGNFKNLREFVFKNIDGYFKIYSKHTPINLVRGLPQGFSALEPLVDLPIGINITRFQTLHISYLTPGDSSSGWTAGAAAYYVGYLQPRTFLLKYNENGTITDAVDCALDPLSETKCTLGSGGGGESQVRQQFSKDIEKLLNEQVNKEMQSSNLYMSMSSWCYTHSLDGAGLFLFDHAAEEYEHAKKLIIFLNENNVPVQLTSISAPEHKFEGLTQIFQKAYEHEQHISESINNIVDHAIKSKDHATFNFLQWYVAEQHEEEVLFKDILDKIELIGNENHGLYLADQYVKGIAKSRKSGS

SEQ ID NO: 228 - protein, 691 aa, Artificial Sequence
  Description of Artificial Sequence: Synthetic polypeptide
HHHHHHHHGPLEVLFQGPNITNLCPFGEVFNATRFASVYAWNRKRISNCVADYSVLYNSASFSTFKCYGVSPTKLNDLCFTNVYADSFVIRGDEVRQIAPGQTGNIADYNYKLPDDFTGCVIAWNSNNLDSKVGGNYNYLRRLFRKSNLKPFERDISTEIYQAGSTPCNGVKGFNCYFPLQSYGFQPTYGVGYQPYRVVVLSFENKSAPATVCGPGSGGSGSSQCVNFTTRTQLPPAYTNSFTRGVYYPDKVFRSSVLHSTQDLFLPFFSNVTWFHAIHVSGTNGTKRFANPVLPFNDGVYFASTEKSNIIRGWIFGTTLDSKTQSLLIVNNATNVVIKVCEFQFCNDPFLGVYYHKNNKSWMESEFRVYSSANNCTFEYVSQPFLMDLEGKQGNFKNLREFVFKNIDGYFKIYSKHTPINLVRDLPQGFSALEPLVDLPIGINITRFQTLHISYLTPGDSSSGWTAGAAAYYVGYLQPRTFLLKYNENGTITDAVDCALDPLSETKCTLGSGGGGESQVRQQFSKDIEKLLNEQVNKEMQSSNLYMSMSSWCYTHSLDGAGLFLFDHAAEEYEHAKKLIIFLNENNVPVQLTSISAPEHKFEGLTQIFQKAYEHEQHISESINNIVDHAIKSKDHATFNFLQWYVAEQHEEEVLFKDILDKIELIGNENHGLYLADQYVKGIAKSRKSGS

SEQ ID NO: 229 - protein, 694 aa, Artificial Sequence
  Description of Artificial Sequence: Synthetic polypeptide
HHHHHHHHGPLEVLFQGPNITNLCPFGEVFNATRFASVYAWNRKRISNCVADYSVLYNSASFSTFKCYGVSPTKLNDLCFTNVYADSFVIRGDEVRQIAPGQTGTIADYNYKLPDDFTGCVIAWNSNNLDSKVGGNYNYLRRLFRKSNLKPFERDISTEIYQAGSTPCNGVKGFNCYFPLQSYGFQPTYGVGYQPYRVVVLSFENKSAPATVCGPGSGGSGSSQCVNFTNRTQLPSAYTNSFTRGVYYPDKVFRSSVLHSTQDLFLPFFSNVTWFHAIHVSGTNGTKRFDNPVLPFNDGVYFASTEKSNIIRGWIFGTTLDSKTQSLLIVNNATNVVIKVCEFQFCNYPFLGVYYHKNNKSWMESEFRVYSSANNCTFEYVSQPFLMDLEGKQGNFKNLSEFVFKNIDGYFKIYSKHTPINLVRDLPQGFSALEPLVDLPIGINITRFQTLLALHRSYLTPGDSSSGWTAGAAAYYVGYLQPRTFLLKYNENGTITDAVDCALDPLSETKCTLGSGGGGESQVRQQFSKDIEKLLNEQVNKEMQSSNLYMSMSSWCYTHSLDGAGLFLFDHAAEEYEHAKKLIIFLNENNVPVQLTSISAPEHKFEGLTQIFQKAYEHEQHISESINNIVDHAIKSKDHATFNFLQWYVAEQHEEEVLFKDILDKIELIGNENHGLYLADQYVKGIAKSRKSGS

SEQ ID NO: 230 - protein, 1315 aa, Artificial Sequence
  Description of Artificial Sequence: Synthetic polypeptide
SSQCVNLTTRTQLPPAYTNSFTRGVYYPDKVFRSSVLHSTQDLFLPFFSNVTWFHAISGTNGTKRFDNPVLPFNDGVYFASTEKSNIIRGWIFGTTLDSKTQSLLIVNNATNVVIKVCEFQFCNDPFLGVYHKNNKSWMESEFRVYSSANNCTFEYVSQPFLMDLEGKQGNFKNLREFVFKNIDGYFKIYSKHTPINLVRDLPQGFSALEPLVDLPIGINITRFQTLLALHRSYLTPGDSSSGWTAGAAAYYVGYLQPRTFLLKYNENGTITDAVDCALDPLSETKCTLKSFTVEKGIYQTSNFRVQPTESIVRFPNITNLCPFGEVFNATRFASVYAWNRKRISNCVADYSVLYNSASFSTFKCYGVSPTKLNDLCFTNVYADSFVIRGDEVRQIAPGQTGKIADYNYKLPDDFTGCVIAWNSNNLDSKVGGNYNYLYRLFRKSNLKPFERDISTEIYQAGSTPCNGVEGFNCYFPLQSYGFQPTYGVGYQPYRVVVLSFELLHAPATVCGPKKSTNLVKNKCVNFNFNGLTGTGVLTESNKKFLPFQQFGRDIDDTTDAVRDPQTLEILDITPCSFGGVSVITPGTNTSNQVAVLYQGVNCTEVPVAIHADQLTPTWRVYSTGSNVFQTRAGCLIGAEHVNNSYECDIPIGAGICASYQTQTNSHGSASSVASQSIIAYTMSLGAENSVAYSNNSIAIPINFTISVTTEILPVSMTKTSVDCTMYICGDSTECSNLLLQYGSFCTQLNRALTGIAVEQDKNTQEVFAQVKQIYKTPPIKDFGGFNFSQILPDPSKPSKRSFIEDLLFNKVTLADAGFIKQYGDCLGDIAARDLICAQKFNGLTVLPPLLTDEMIAQYTSALLAGTITSGWTFGAGAALQIPFAMQMAYRFNGIGVTQNVLYENQKLIANQFNSAIGKIQDSLSSTASALGKLQDVVNQNAQALNTLVKQLSSNFGAISSVLNDILARLDPPEAEVQIDRLITGRLQSLQTYVTQQLIRAAEIRASANLAATKMSECVLGQSKRVDFCGKGYHLMSFPQSAPHGVVFLHVTYVPAQEKNFTTAPAICHDGKAHFPREGVFVSNGTHWFVTQRNFYEPQIITTHNTFVSGNCDVVIGIVNNTVYDPLQSELDSIKEELDKIHKNGSGGSGDIIKLLNEQVNKEMQSSNLYMSMSSWCYTHSLDGAGLFLFDHAAEEYEHAKKLIIFLNENNVPVQLTSISAPEHKFEGLTQIFQKAYEHEQHISESINNIVDHAIKSKDHATFNFLQWYVAEQHEEEVLFKDILDKIELIGNENHGLYLADQYVKGIAKSRKSGS

SEQ ID NO: 231 - protein, 1315 aa, Artificial Sequence
  Description of Artificial Sequence: Synthetic polypeptide
SSQCVNFTTRTQLPPAYTNSFTRGVYYPDKVFRSSVLHSTQDLFLPFFSNVTWFHAIHVSGTNGTKRFANPVLPFNDGVYFASTEKSNIIRGWIFGTTLDSKTQSLLIVNNATNVVIKVCEFQFCNDPFLGVYYHKNNKSWMESEFRVYSSANNCTFEYVSQPFLMDLEGKQGNFKNLREFVFKNIDGYFKIYSKHTPINLVRGLPQGFSALEPLVDLPIGINITRFQTLHISYLTPGDSSSGWTAGAAAYYVGYLQPRTFLLKYNENGTITDAVDCALDPLSETKCTLKSFTVEKGIYQTSNFRVQPTESIVRFPNITNLCPFGEVFNATRFASVYAWNRKRISNCVADYSVLYNSASFSTFKCYGVSPTKLNDLCFTNVYADSFVIRGDEVRQIAPGQTGNIADYNYKLPDDFTGCVIAWNSNNLDSKVGGNYNYLYRLFRKSNLKPFERDISTEIYQAGSTPCNGVKGFNCYFPLQSYGFQPTYGVGYQPYRVVVLSFELLHAPATVCGPKKSTNLVKNKCVNFNFNGLTGTGVLTESNKKFLPFQQFGRDIADTTDAVRDPQTLEILDITPCSFGGVSVITPGTNTSNQVAVLYQGVNCTEVPVAIHADQLTPTWRVYSTGSNVFQTRAGCLIGAEHVNNSYECDIPIGAGICASYQTQTNSPGSASSVASQSIIAYTMSLGVENSVAYSNNSIAIPTNFTISVTTEILPVSMTKTSVDCTMYICGDSTECSNLLLQYGSFCTQLNRALTGIAVEQDKNTQEVFAQVKQIYKTPPIKDFGGFNFSQILPDPSKPSKRSFIEDLLFNKVTLADAGFIKQYGDCLGDIAARDLICAQKFNGLTVLPPLLTDEMIAQYTSALLAGTITSGWTFGAGAALQIPFAMQMAYRFNGIGVTQNVLYENQKLIANQFNSAIGKIQDSLSSTASALGKLQDVVNQNAQALNTLVKQLSSNFGAISSVLNDILSRLDPPEAEVQIDRLITGRLQSLQTYVTQQLIRAAEIRASANLAATKMSECVLGQSKRVDFCGKGYHLMSFPQSAPHGVVFLHVTYVPAQEKNFTTAPAICHDGKAHFPREGVFVSNGTHWFVTQRNFYEPQIITTDNTFVSGNCDVVIGIVNNTVYDPLQSELDSIKEELDKIHKNGSGGSGDIIKLLNEQVNKEMQSSNLYMSMSSWCYTHSLDGAGLFLFDHAAEEYEHAKKLIIFLNENNVPVQLTSISAPEHKFEGLTQIFQKAYEHEQHISESINNIVDHAIKSKDHATFNFLQWYVAEQHEEEVLFKDILDKIELIGNENHGLYLADQYVKGIAKSRKSGS

SEQ ID NO: 232 - protein, 1315 aa, Artificial Sequence
  Description of Artificial Sequence: Synthetic polypeptide
SSQCVNFTTRTQLPPAYTNSFTRGVYYPDKVFRSSVLHSTQDLFLPFFSNVTWFHAIHVSGTNGTKRFDNPVLPFNDGVYFASTEKSNIIRGWIFGTTLDSKTQSLLIVNNATNVVIKVCEFQFCNDPFLGVYYHKNNKSWMESEFRVYSSANNCTFEYVSQPFLMDLEGKQGNFKNLREFVFKNIDGYFKIYSKHTPINLVRGLPQGFSALEPLVDLPIGINITRFQTLHISYLTPGDSSSGWTAGAAAYYVGYLQPRTFLLKYNENGTITDAVDCALDPLSETKCTLKSFTVEKGIYQTSNFRVQPTESIVRFPNITNLCPFGEVFNATRFASVYAWNRKRISNCVADYSVLYNSASFSTFKCYGVSPTKLNDLCFTNVYADSFVIRGDEVRQIAPGQTGNIADYNYKLPDDFTGCVIAWNSNNLDSKVGGNYNYLYRLFRKSNLKPFERDISTEIYQAGSTPCNGVKGFNCYFPLQSYGFQPTYGVGYQPYRVVVLSFELLHAPATVCGPKKSTNLVKNKCVNFNFNGLTGTGVLTESNKKFLPFQQFGRDIADTTDAVRDPQTLEILDITPCSFGGVSVITPGTNTSNQVAVLYQGVNCTEVPVAIHADQLTPTWRVYSTGSNVFQTRAGCLIGAEHVNNSYECDIPIGAGICASYQTQTNSPGSASSVASQSIIAYTMSLGVENSVAYSNNSIAIPTNFTISVTTEILPVSMTKTSVDCTMYICGDSTECSNLLLQYGSFCTQLNRALTGIAVEQDKNTQEVFAQVKQIYKTPPIKDFGGFNFSQILPDPSKPSKRSFIEDLLFNKVTLADAGFIKQYGDCLGDIAARDLICAQKFNGLTVLPPLLTDEMIAQYTSALLAGTITSGWTFGAGAALQIPFAMQMAYRFNGIGVTQNVLYENQKLIANQFNSAIGKIQDSLSSTASALGKLQDVVNQNAQALNTLVKQLSSNFGAISSVLNDILSRLDPPEAEVQIDRLITGRLQSLQTYVTQQLIRAAEIRASANLAATKMSECVLGQSKRVDFCGKGYHLMSFPQSAPHGVVFLHVTYVPAQEKNFTTAPAICHDGKAHFPREGVFVSNGTHWFVTQRNFYEPQIITTDNTFVSGNCDVVIGIVNNTVYDPLQSELDSIKEELDKIHKNGSGGSGDIIKLLNEQVNKEMQSSNLYMSMSSWCYTHSLDGAGLFLFDHAAEEYEHAKKLIIFLNENNVPVQLTSISAPEHKFEGLTQIFQKAYEHEQHISESINNIVDHAIKSKDHATFNFLQWYVAEQHEEEVLFKDILDKIELIGNENHGLYLADQYVKGIAKSRKSGS

SEQ ID NO: 233 - protein, 1315 aa, Artificial Sequence
  Description of Artificial Sequence: Synthetic polypeptide
SSQCVNFTTRTQLPPAYTNSFTRGVYYPDKVFRSSVLHSTQDLFLPFFSNVTWFHAIHVSGTNGTKRFANPVLPFNDGVYFASTEKSNIIRGWIFGTTLDSKTQSLLIVNNATNVVIKVCEFQFCNDPFLGVYYHKNNKSWMESEFRVYSSANNCTFEYVSQPFLMDLEGKQGNFKNLREFVFKNIDGYFKIYSKHTPINLVRDLPQGFSALEPLVDLPIGINITRFQTLHISYLTPGDSSSGWTAGAAAYYVGYLQPRTFLLKYNENGTITDAVDCALDPLSETKCTLKSFTVEKGIYQTSNFRVQPTESIVRFPNITNLCPFGEVFNATRFASVYAWNRKRISNCVADYSVLYNSASFSTFKCYGVSPTKLNDLCFTNVYADSFVIRGDEVRQIAPGQTGNIADYNYKLPDDFTGCVIAWNSNNLDSKVGGNYNYLYRLFRKSNLKPFERDISTEIYQAGSTPCNGVKGFNCYFPLQSYGFQPTYGVGYQPYRVVVLSFELLHAPATVCGPKKSTNLVKNKCVNFNFNGLTGTGVLTESNKKFLPFQQFGRDIADTTDAVRDPQTLEILDITPCSFGGVSVITPGTNTSNQVAVLYQGVNCTEVPVAIHADQLTPTWRVYSTGSNVFQTRAGCLIGAEHVNNSYECDIPIGAGICASYQTQTNSPGSASSVASQSIIAYTMSLGVENSVAYSNNSIAIPTNFTISVTTEILPVSMTKTSVDCTMYICGDSTECSNLLLQYGSFCTQLNRALTGIAVEQDKNTQEVFAQVKQIYKTPPIKDFGGFNFSQILPDPSKPSKRSFIEDLLFNKVTLADAGFIKQYGDCLGDIAARDLICAQKFNGLTVLPPLLTDEMIAQYTSALLAGTITSGWTFGAGAALQIPFAMQMAYRFNGIGVTQNVLYENQKLIANQFNSAIGKIQDSLSSTASALGKLQDVVNQNAQALNTLVKQLSSNFGAISSVLNDILSRLDPPEAEVQIDRLITGRLQSLQTYVTQQLIRAAEIRASANLAATKMSECVLGQSKRVDFCGKGYHLMSFPQSAPHGVVFLHVTYVPAQEKNFTTAPAICHDGKAHFPREGVFVSNGTHWFVTQRNFYEPQIITTDNTFVSGNCDVVIGIVNNTVYDPLQSELDSIKEELDKIHKNGSGGSGDIIKLLNEQVNKEMQSSNLYMSMSSWCYTHSLDGAGLFLFDHAAEEYEHAKKLIIFLNENNVPVQLTSISAPEHKFEGLTQIFQKAYEHEQHISESINNIVDHAIKSKDHATFNFLQWYVAEQHEEEVLFKDILDKIELIGNENHGLYLADQYVKGIAKSRKSGS

SEQ ID NO: 234 - protein, 1315 aa, Artificial Sequence
  Description of Artificial Sequence: Synthetic polypeptide
SSQCVNFTTRTQLPPAYTNSFTRGVYYPDKVFRSSVLHSTQDLFLPFFSNVTWFHAIHVSGTNGTKRFANPVLPFNDGVYFASTEKSNIIRGWIFGTTLDSKTQSLLIVNNATNVVIKVCEFQFCNDPFLGVYYHKNNKSWMESEFRVYSSANNCTFEYVSQPFLMDLEGKQGNFKNLREFVFKNIDGYFKIYSKHTPINLVRGLPQGFSALEPLVDLPIGINITRFQTLHRSYLTPGDSSSGWTAGAAAYYVGYLQPRTFLLKYNENGTITDAVDCALDPLSETKCTLKSFTVEKGIYQTSNFRVQPTESIVRFPNITNLCPFGEVFNATRFASVYAWNRKRISNCVADYSVLYNSASFSTFKCYGVSPTKLNDLCFTNVYADSFVIRGDEVRQIAPGQTGNIADYNYKLPDDFTGCVIAWNSNNLDSKVGGNYNYLYRLFRKSNLKPFERDISTEIYQAGSTPCNGVKGFNCYFPLQSYGFQPTYGVGYQPYRVVVLSFELLHAPATVCGPKKSTNLVKNKCVNFNFNGLTGTGVLTESNKKFLPFQQFGRDIADTTDAVRDPQTLEILDITPCSFGGVSVITPGTNTSNQVAVLYQGVNCTEVPVAIHADQLTPTWRVYSTGSNVFQTRAGCLIGAEHVNNSYECDIPIGAGICASYQTQTNSPGSASSVASQSIIAYTMSLGVENSVAYSNNSIAIPTNFTISVTTEILPVSMTKTSVDCTMYICGDSTECSNLLLQYGSFCTQLNRALTGIAVEQDKNTQEVFAQVKQIYKTPPIKDFGGFNFSQILPDPSKPSKRSFIEDLLFNKVTLADAGFIKQYGDCLGDIAARDLICAQKFNGLTVLPPLLTDEMIAQYTSALLAGTITSGWTFGAGAALQIPFAMQMAYRFNGIGVTQNVLYENQKLIANQFNSAIGKIQDSLSSTASALGKLQDVVNQNAQALNTLVKQLSSNFGAISSVLNDILSRLDPPEAEVQIDRLITGRLQSLQTYVTQQLIRAAEIRASANLAATKMSECVLGQSKRVDFCGKGYHLMSFPQSAPHGVVFLHVTYVPAQEKNFTTAPAICHDGKAHFPREGVFVSNGTHWFVTQRNFYEPQIITTDNTFVSGNCDVVIGIVNNTVYDPLQSELDSIKEELDKIHKNGSGGSGDIIKLLNEQVNKEMQSSNLYMSMSSWCYTHSLDGAGLFLFDHAAEEYEHAKKLIIFLNENNVPVQLTSISAPEHKFEGLTQIFQKAYEHEQHISESINNIVDHAIKSKDHATFNFLQWYVAEQHEEEVLFKDILDKIELIGNENHGLYLADQYVKGIAKSRKSGS

SEQ ID NO: 235 - protein, 1315 aa, Artificial Sequence
  Description of Artificial Sequence: Synthetic polypeptide
SSQCVNFTTRTQLPPAYTNSFTRGVYYPDKVFRSSVLHSTQDLFLPFFSNVTWFHAIHVSGTNGTKRFDNPVLPFNDGVYFASTEKSNIIRGWIFGTTLDSKTQSLLIVNNATNVVIKVCEFQFCNDPFLGVYYHKNNKSWMESEFRVYSSANNCTFEYVSQPFLMDLEGKQGNFKNLREFVFKNIDGYFKIYSKHTPINLVRGLPQGFSALEPLVDLPIGINITRFQTLHRSYLTPGDSSSGWTAGAAAYYVGYLQPRTFLLKYNENGTITDAVDCALDPLSETKCTLKSFTVEKGIYQTSNFRVQPTESIVRFPNITNLCPFGEVFNATRFASVYAWNRKRISNCVADYSVLYNSASFSTFKCYGVSPTKLNDLCFTNVYADSFVIRGDEVRQIAPGQTGNIADYNYKLPDDFTGCVIAWNSNNLDSKVGGNYNYLYRLFRKSNLKPFERDISTEIYQAGSTPCNGVKGFNCYFPLQSYGFQPTYGVGYQPYRVVVLSFELLHAPATVCGPKKSTNLVKNKCVNFNFNGLTGTGVLTESNKKFLPFQQFGRDIADTTDAVRDPQTLEILDITPCSFGGVSVITPGTNTSNQVAVLYQGVNCTEVPVAIHADQLTPTWRVYSTGSNVFQTRAGCLIGAEHVNNSYECDIPIGAGICASYQTQTNSPGSASSVASQSIIAYTMSLGVENSVAYSNNSIAIPTNFTISVTTEILPVSMTKTSVDCTMYICGDSTECSNLLLQYGSFCTQLNRALTGIAVEQDKNTQEVFAQVKQIYKTPPIKDFGGFNFSQILPDPSKPSKRSFIEDLLFNKVTLADAGFIKQYGDCLGDIAARDLICAQKFNGLTVLPPLLTDEMIAQYTSALLAGTITSGWTFGAGAALQIPFAMQMAYRFNGIGVTQNVLYENQKLIANQFNSAIGKIQDSLSSTASALGKLQDVVNQNAQALNTLVKQLSSNFGAISSVLNDILSRLDPPEAEVQIDRLITGRLQSLQTYVTQQLIRAAEIRASANLAATKMSECVLGQSKRVDFCGKGYHLMSFPQSAPHGVVFLHVTYVPAQEKNFTTAPAICHDGKAHFPREGVFVSNGTHWFVTQRNFYEPQIITTDNTFVSGNCDVVIGIVNNTVYDPLQSELDSIKEELDKIHKNGSGGSGDIIKLLNEQVNKEMQSSNLYMSMSSWCYTHSLDGAGLFLFDHAAEEYEHAKKLIIFLNENNVPVQLTSISAPEHKFEGLTQIFQKAYEHEQHISESINNIVDHAIKSKDHATFNFLQWYVAEQHEEEVLFKDILDKIELIGNENHGLYLADQYVKGIAKSRKSGS

SEQ ID NO: 236 - protein, 1315 aa, Artificial Sequence
  Description of Artificial Sequence: Synthetic polypeptide
SSQCVNFTTRTQLPPAYTNSFTRGVYYPDKVFRSSVLHSTQDLFLPFFSNVTWFHAIHVSGTNGTKRFANPVLPFNDGVYFASTEKSNIIRGWIFGTTLDSKTQSLLIVNNATNVVIKVCEFQFCNDPFLGVYYHKNNKSWMESEFRVYSSANNCTFEYVSQPFLMDLEGKQGNFKNLREFVFKNIDGYFKIYSKHTPINLVRDLPQGFSALEPLVDLPIGINITRFQTLHRSYLTPGDSSSGWTAGAAAYYVGYLQPRTFLLKYNENGTITDAVDCALDPLSETKCTLKSFTVEKGIYQTSNFRVQPTESIVRFPNITNLCPFGEVFNATRFASVYAWNRKRISNCVADYSVLYNSASFSTFKCYGVSPTKLNDLCFTNVYADSFVIRGDEVRQIAPGQTGNIADYNYKLPDDFTGCVIAWNSNNLDSKVGGNYNYLYRLFRKSNLKPFERDISTEIYQAGSTPCNGVKGFNCYFPLQSYGFQPTYGVGYQPYRVVVLSFELLHAPATVCGPKKSTNLVKNKCVNFNFNGLTGTGVLTESNKKFLPFQQFGRDIADTTDAVRDPQTLEILDITPCSFGGVSVITPGTNTSNQVAVLYQGVNCTEVPVAIHADQLTPTWRVYSTGSNVFQTRAGCLIGAEHVNNSYECDIPIGAGICASYQTQTNSPGSASSVASQSIIAYTMSLGVENSVAYSNNSIAIPTNFTISVTTEILPVSMTKTSVDCTMYICGDSTECSNLLLQYGSFCTQLNRALTGIAVEQDKNTQEVFAQVKQIYKTPPIKDFGGFNFSQILPDPSKPSKRSFIEDLLFNKVTLADAGFIKQYGDCLGDIAARDLICAQKFNGLTVLPPLLTDEMIAQYTSALLAGTITSGWTFGAGAALQIPFAMQMAYRFNGIGVTQNVLYENQKLIANQFNSAIGKIQDSLSSTASALGKLQDVVNQNAQALNTLVKQLSSNFGAISSVLNDILSRLDPPEAEVQIDRLITGRLQSLQTYVTQQLIRAAEIRASANLAATKMSECVLGQSKRVDFCGKGYHLMSFPQSAPHGVVFLHVTYVPAQEKNFTTAPAICHDGKAHFPREGVFVSNGTHWFVTQRNFYEPQIITTDNTFVSGNCDVVIGIVNNTVYDPLQSELDSIKEELDKIHKNGSGGSGDIIKLLNEQVNKEMQSSNLYMSMSSWCYTHSLDGAGLFLFDHAAEEYEHAKKLIIFLNENNVPVQLTSISAPEHKFEGLTQIFQKAYEHEQHISESINNIVDHAIKSKDHATFNFLQWYVAEQHEEEVLFKDILDKIELIGNENHGLYLADQYVKGIAKSRKSGS

SEQ ID NO: 237 - protein, 1318 aa, Artificial Sequence
  Description of Artificial Sequence: Synthetic polypeptide
SSQCVNFTNRTQLPSAYTNSFTRGVYYPDKVFRSSVLHSTQDLFLPFFSNVTWFHAIHVSGTNGTKRFDNPVLPFNDGVYFASTEKSNIIRGWIFGTTLDSKTQSLLIVNNATNVVIKVCEFQFCNYPFLGVYYHKNNKSWMESEFRVYSSANNCTFEYVSQPFLMDLEGKQGNFKNLSEFVFKNIDGYFKIYSKHTPINLVRDLPQGFSALEPLVDLPIGINITRFQTLLALHRSYLTPGDSSSGWTAGAAAYYVGYLQPRTFLLKYNENGTITDAVDCALDPLSETKCTLKSFTVEKGIYQTSNFRVQPTESIVRFPNITNLCPFGEVFNATRFASVYAWNRKRISNCVADYSVLYNSASFSTFKCYGVSPTKLNDLCFTNVYADSFVIRGDEVRQIAPGQTGTIADYNYKLPDDFTGCVIAWNSNNLDSKVGGNYNYLYRLFRKSNLKPFERDISTEIYQAGSTPCNGVKGFNCYFPLQSYGFQPTYGVGYQPYRVVVLSFELLHAPATVCGPKKSTNLVKNKCVNFNFNGLTGTGVLTESNKKFLPFQQFGRDIADTTDAVRDPQTLEILDITPCSFGGVSVITPGTNTSNQVAVLYQGVNCTEVPVAIHADQLTPTWRVYSTGSNVFQTRAGCLIGAEYVNNSYECDIPIGAGICASYQTQTNSPGSASSVASQSIIAYTMSLGAENSVAYSNNSIAIPTNFTISVTTEILPVSMTKTSVDCTMYICGDSTECSNLLLQYGSFCTQLNRALTGIAVEQDKNTQEVFAQVKQIYKTPPIKDFGGFNFSQILPDPSKPSKRSFIEDLLFNKVTLADAGFIKQYGDCLGDIAARDLICAQKFNGLTVLPPLLTDEMIAQYTSALLAGTITSGWTFGAGAALQIPFAMQMAYRFNGIGVTQNVLYENQKLIANQFNSAIGKIQDSLSSTASALGKLQDVVNQNAQALNTLVKQLSSNFGAISSVLNDILSRLDPPEAEVQIDRLITGRLQSLQTYVTQQLIRAAEIRASANLAAIKMSECVLGQSKRVDFCGKGYHLMSFPQSAPHGVVFLHVTYVPAQEKNFTTAPAICHDGKAHFPREGVFVSNGTHWFVTQRNFYEPQIITTDNTFVSGNCDVVIGIVNNTVYDPLQSELDSIKEELDKIHKNGSGGSGDIIKLLNEQVNKEMQSSNLYMSMSSWCYTHSLDGAGLFLFDHAAEEYEHAKKLIIFLNENNVPVQLTSISAPEHKFEGLTQIFQKAYEHEQHISESINNIVDHAIKSKDHATFNFLQWYVAEQHEEEVLFKDILDKIELIGNENHGLYLADQYVKGIAKSRKSGS

SEQ ID NO: 238 - protein, 1329 aa, Artificial Sequence
  Description of Artificial Sequence: Synthetic polypeptide
SSQCVNLTTRTQLPPAYTNSFTRGVYYPDKVFRSSVLHSTQDLFLPFFSNVTWFHAISGTNGTKRFDNPVLPFNDGVYFASTEKSNIIRGWIFGTTLDSKTQSLLIVNNATNVVIKVCEFQFCNDPFLGVYHKNNKSWMESEFRVYSSANNCTFEYVSQPFLMDLEGKQGNFKNLREFVFKNIDGYFKIYSKHTPINLVRDLPQGFSALEPLVDLPIGINITRFQTLLALHRSYLTPGDSSSGWTAGAAAYYVGYLQPRTFLLKYNENGTITDAVDCALDPLSETKCTLKSFTVEKGIYQTSNFRVQPTESIVRFPNITNLCPFGEVFNATRFASVYAWNRKRISNCVADYSVLYNSASFSTFKCYGVSPTKLNDLCFTNVYADSFVIRGDEVRQIAPGQTGKIADYNYKLPDDFTGCVIAWNSNNLDSKVGGNYNYLYRLFRKSNLKPFERDISTEIYQAGSTPCNGVEGFNCYFPLQSYGFQPTYGVGYQPYRVVVLSFELLHAPATVCGPKKSTNLVKNKCVNFNFNGLTGTGVLTESNKKFLPFQQFGRDIDDTTDAVRDPQTLEILDITPCSFGGVSVITPGTNTSNQVAVLYQGVNCTEVPVAIHADQLTPTWRVYSTGSNVFQTRAGCLIGAEHVNNSYECDIPIGAGICASYQTQTNSHGSASSVASQSIIAYTMSLGAENSVAYSNNSIAIPINFTISVTTEILPVSMTKTSVDCTMYICGDSTECSNLLLQYGSFCTQLNRALTGIAVEQDKNTQEVFAQVKQIYKTPPIKDFGGFNFSQILPDPSKPSKRSFIEDLLFNKVTLADAGFIKQYGDCLGDIAARDLICAQKFNGLTVLPPLLTDEMIAQYTSALLAGTITSGWTFGAGAALQIPFAMQMAYRFNGIGVTQNVLYENQKLIANQFNSAIGKIQDSLSSTASALGKLQDVVNQNAQALNTLVKQLSSNFGAISSVLNDILARLDPPEAEVQIDRLITGRLQSLQTYVTQQLIRAAEIRASANLAATKMSECVLGQSKRVDFCGKGYHLMSFPQSAPHGVVFLHVTYVPAQEKNFTTAPAICHDGKAHFPREGVFVSNGTHWFVTQRNFYEPQIITTHNTFVSGNCDVVIGIVNNTVYDPLQSELDSIKEELDKIHKNLDSIKEELDKIHKNGSGGSGDIIKLLNEQVNKEMQSSNLYMSMSSWCYTHSLDGAGLFLFDHAAEEYEHAKKLIIFLNENNVPVQLTSISAPEHKFEGLTQIFQKAYEHEQHISESINNIVDHAIKSKDHATFNFLQWYVAEQHEEEVLFKDILDKIELIGNENHGLYLADQYVKGIAKSRKSGS

SEQ ID NO: 239 - protein, 1329 aa, Artificial Sequence
  Description of Artificial Sequence: Synthetic polypeptide
SSQCVNFTTRTQLPPAYTNSFTRGVYYPDKVFRSSVLHSTQDLFLPFFSNVTWFHAIHVSGTNGTKRFANPVLPFNDGVYFASTEKSNIIRGWIFGTTLDSKTQSLLIVNNATNVVIKVCEFQFCNDPFLGVYYHKNNKSWMESEFRVYSSANNCTFEYVSQPFLMDLEGKQGNFKNLREFVFKNIDGYFKIYSKHTPINLVRGLPQGFSALEPLVDLPIGINITRFQTLHISYLTPGDSSSGWTAGAAAYYVGYLQPRTFLLKYNENGTITDAVDCALDPLSETKCTLKSFTVEKGIYQTSNFRVQPTESIVRFPNITNLCPFGEVFNATRFASVYAWNRKRISNCVADYSVLYNSASFSTFKCYGVSPTKLNDLCFTNVYADSFVIRGDEVRQIAPGQTGNIADYNYKLPDDFTGCVIAWNSNNLDSKVGGNYNYLYRLFRKSNLKPFERDISTEIYQAGSTPCNGVKGFNCYFPLQSYGFQPTYGVGYQPYRVVVLSFELLHAPATVCGPKKSTNLVKNKCVNFNFNGLTGTGVLTESNKKFLPFQQFGRDIADTTDAVRDPQTLEILDITPCSFGGVSVITPGTNTSNQVAVLYQGVNCTEVPVAIHADQLTPTWRVYSTGSNVFQTRAGCLIGAEHVNNSYECDIPIGAGICASYQTQTNSPGSASSVASQSIIAYTMSLGVENSVAYSNNSIAIPTNFTISVTTEILPVSMTKTSVDCTMYICGDSTECSNLLLQYGSFCTQLNRALTGIAVEQDKNTQEVFAQVKQIYKTPPIKDFGGFNFSQILPDPSKPSKRSFIEDLLFNKVTLADAGFIKQYGDCLGDIAARDLICAQKFNGLTVLPPLLTDEMIAQYTSALLAGTITSGWTFGAGAALQIPFAMQMAYRFNGIGVTQNVLYENQKLIANQFNSAIGKIQDSLSSTASALGKLQDVVNQNAQALNTLVKQLSSNFGAISSVLNDILSRLDPPEAEVQIDRLITGRLQSLQTYVTQQLIRAAEIRASANLAATKMSECVLGQSKRVDFCGKGYHLMSFPQSAPHGVVFLHVTYVPAQEKNFTTAPAICHDGKAHFPREGVFVSNGTHWFVTQRNFYEPQIITTDNTFVSGNCDVVIGIVNNTVYDPLQSELDSIKEELDKIHKNLDSIKEELDKIHKNGSGGSGDIIKLLNEQVNKEMQSSNLYMSMSSWCYTHSLDGAGLFLFDHAAEEYEHAKKLIIFLNENNVPVQLTSISAPEHKFEGLTQIFQKAYEHEQHISESINNIVDHAIKSKDHATFNFLQWYVAEQHEEEVLFKDILDKIELIGNENHGLYLADQYVKGIAKSRKSGS

SEQ ID NO: 240 - protein, 1329 aa, Artificial Sequence
  Description of Artificial Sequence: Synthetic polypeptide
SSQCVNFTTRTQLPPAYTNSFTRGVYYPDKVFRSSVLHSTQDLFLPFFSNVTWFHAIHVSGTNGTKRFDNPVLPFNDGVYFASTEKSNIIRGWIFGTTLDSKTQSLLIVNNATNVVIKVCEFQFCNDPFLGVYYHKNNKSWMESEFRVYSSANNCTFEYVSQPFLMDLEGKQGNFKNLREFVFKNIDGYFKIYSKHTPINLVRGLPQGFSALEPLVDLPIGINITRFQTLHISYLTPGDSSSGWTAGAAAYYVGYLQPRTFLLKYNENGTITDAVDCALDPLSETKCTLKSFTVEKGIYQTSNFRVQPTESIVRFPNITNLCPFGEVFNATRFASVYAWNRKRISNCVADYSVLYNSASFSTFKCYGVSPTKLNDLCFTNVYADSFVIRGDEVRQIAPGQTGNIADYNYKLPDDFTGCVIAWNSNNLDSKVGGNYNYLYRLFRKSNLKPFERDISTEIYQAGSTPCNGVKGFNCYFPLQSYGFQPTYGVGYQPYRVVVLSFELLHAPATVCGPKKSTNLVKNKCVNFNFNGLTGTGVLTESNKKFLPFQQFGRDIADTTDAVRDPQTLEILDITPCSFGGVSVITPGTNTSNQVAVLYQGVNCTEVPVAIHADQLTPTWRVYSTGSNVFQTRAGCLIGAEHVNNSYECDIPIGAGICASYQTQTNSPGSASSVASQSIIAYTMSLGVENSVAYSNNSIAIPTNFTISVTTEILPVSMTKTSVDCTMYICGDSTECSNLLLQYGSFCTQLNRALTGIAVEQDKNTQEVFAQVKQIYKTPPIKDFGGFNFSQILPDPSKPSKRSFIEDLLFNKVTLADAGFIKQYGDCLGDIAARDLICAQKFNGLTVLPPLLTDEMIAQYTSALLAGTITSGWTFGAGAALQIPFAMQMAYRFNGIGVTQNVLYENQKLIANQFNSAIGKIQDSLSSTASALGKLQDVVNQNAQALNTLVKQLSSNFGAISSVLNDILSRLDPPEAEVQIDRLITGRLQSLQTYVTQQLIRAAEIRASANLAATKMSECVLGQSKRVDFCGKGYHLMSFPQSAPHGVVFLHVTYVPAQEKNFTTAPAICHDGKAHFPREGVFVSNGTHWFVTQRNFYEPQIITTDNTFVSGNCDVVIGIVNNTVYDPLQSELDSIKEELDKIHKNLDSIKEELDKIHKNGSGGSGDIIKLLNEQVNKEMQSSNLYMSMSSWCYTHSLDGAGLFLFDHAAEEYEHAKKLIIFLNENNVPVQLTSISAPEHKFEGLTQIFQKAYEHEQHISESINNIVDHAIKSKDHATFNFLQWYVAEQHEEEVLFKDILDKIELIGNENHGLYLADQYVKGIAKSRKSGS

SEQ ID NO: 241 - protein, 1329 aa, Artificial Sequence
  Description of Artificial Sequence: Synthetic polypeptide
SSQCVNFTTRTQLPPAYTNSFTRGVYYPDKVFRSSVLHSTQDLFLPFFSNVTWFHAIHVSGTNGTKRFANPVLPFNDGVYFASTEKSNIIRGWIFGTTLDSKTQSLLIVNNATNVVIKVCEFQFCNDPFLGVYYHKNNKSWMESEFRVYSSANNCTFEYVSQPFLMDLEGKQGNFKNLREFVFKNIDGYFKIYSKHTPINLVRDLPQGFSALEPLVDLPIGINITRFQTLHISYLTPGDSSSGWTAGAAAYYVGYLQPRTFLLKYNENGTITDAVDCALDPLSETKCTLKSFTVEKGIYQTSNFRVQPTESIVRFPNITNLCPFGEVFNATRFASVYAWNRKRISNCVADYSVLYNSASFSTFKCYGVSPTKLNDLCFTNVYADSFVIRGDEVRQIAPGQTGNIADYNYKLPDDFTGCVIAWNSNNLDSKVGGNYNYLYRLFRKSNLKPFERDISTEIYQAGSTPCNGVKGFNCYFPLQSYGFQPTYGVGYQPYRVVVLSFELLHAPATVCGPKKSTNLVKNKCVNFNFNGLTGTGVLTESNKKFLPFQQFGRDIADTTDAVRDPQTLEILDITPCSFGGVSVITPGTNTSNQVAVLYQGVNCTEVPVAIHADQLTPTWRVYSTGSNVFQTRAGCLIGAEHVNNSYECDIPIGAGICASYQTQTNSPGSASSVASQSIIAYTMSLGVENSVAYSNNSIAIPTNFTISVTTEILPVSMTKTSVDCTMYICGDSTECSNLLLQYGSFCTQLNRALTGIAVEQDKNTQEVFAQVKQIYKTPPIKDFGGFNFSQILPDPSKPSKRSFIEDLLFNKVTLADAGFIKQYGDCLGDIAARDLICAQKFNGLTVLPPLLTDEMIAQYTSALLAGTITSGWTFGAGAALQIPFAMQMAYRFNGIGVTQNVLYENQKLIANQFNSAIGKIQDSLSSTASALGKLQDVVNQNAQALNTLVKQLSSNFGAISSVLNDILSRLDPPEAEVQIDRLITGRLQSLQTYVTQQLIRAAEIRASANLAATKMSECVLGQSKRVDFCGKGYHLMSFPQSAPHGVVFLHVTYVPAQEKNFTTAPAICHDGKAHFPREGVFVSNGTHWFVTQRNFYEPQIITTDNTFVSGNCDVVIGIVNNTVYDPLQSELDSIKEELDKIHKNLDSIKEELDKIHKNGSGGSGDIIKLLNEQVNKEMQSSNLYMSMSSWCYTHSLDGAGLFLFDHAAEEYEHAKKLIIFLNENNVPVQLTSISAPEHKFEGLTQIFQKAYEHEQHISESINNIVDHAIKSKDHATFNFLQWYVAEQHEEEVLFKDILDKIELIGNENHGLYLADQYVKGIAKSRKSGS

SEQ ID NO: 242 - protein, 1329 aa, Artificial Sequence
  Description of Artificial Sequence: Synthetic polypeptide
SSQCVNFTTRTQLPPAYTNSFTRGVYYPDKVFRSSVLHSTQDLFLPFFSNVTWFHAIHVSGTNGTKRFANPVLPFNDGVYFASTEKSNIIRGWIFGTTLDSKTQSLLIVNNATNVVIKVCEFQFCNDPFLGVYYHKNNKSWMESEFRVYSSANNCTFEYVSQPFLMDLEGKQGNFKNLREFVFKNIDGYFKIYSKHTPINLVRGLPQGFSALEPLVDLPIGINITRFQTLHRSYLTPGDSSSGWTAGAAAYYVGYLQPRTFLLKYNENGTITDAVDCALDPLSETKCTLKSFTVEKGIYQTSNFRVQPTESIVRFPNITNLCPFGEVFNATRFASVYAWNRKRISNCVADYSVLYNSASFSTFKCYGVSPTKLNDLCFTNVYADSFVIRGDEVRQIAPGQTGNIADYNYKLPDDFTGCVIAWNSNNLDSKVGGNYNYLYRLFRKSNLKPFERDISTEIYQAGSTPCNGVKGFNCYFPLQSYGFQPTYGVGYQPYRVVVLSFELLHAPATVCGPKKSTNLVKNKCVNFNFNGLTGTGVLTESNKKFLPFQQFGRDIADTTDAVRDPQTLEILDITPCSFGGVSVITPGTNTSNQVAVLYQGVNCTEVPVAIHADQLTPTWRVYSTGSNVFQTRAGCLIGAEHVNNSYECDIPIGAGICASYQTQTNSPGSASSVASQSIIAYTMSLGVENSVAYSNNSIAIPTNFTISVTTEILPVSMTKTSVDCTMYICGDSTECSNLLLQYGSFCTQLNRALTGIAVEQDKNTQEVFAQVKQIYKTPPIKDFGGFNFSQILPDPSKPSKRSFIEDLLFNKVTLADAGFIKQYGDCLGDIAARDLICAQKFNGLTVLPPLLTDEMIAQYTSALLAGTITSGWTFGAGAALQIPFAMQMAYRFNGIGVTQNVLYENQKLIANQFNSAIGKIQDSLSSTASALGKLQDVVNQNAQALNTLVKQLSSNFGAISSVLNDILSRLDPPEAEVQIDRLITGRLQSLQTYVTQQLIRAAEIRASANLAATKMSECVLGQSKRVDFCGKGYHLMSFPQSAPHGVVFLHVTYVPAQEKNFTTAPAICHDGKAHFPREGVFVSNGTHWFVTQRNFYEPQIITTDNTFVSGNCDVVIGIVNNTVYDPLQSELDSIKEELDKIHKNLDSIKEELDKIHKNGSGGSGDIIKLLNEQVNKEMQSSNLYMSMSSWCYTHSLDGAGLFLFDHAAEEYEHAKKLIIFLNENNVPVQLTSISAPEHKFEGLTQIFQKAYEHEQHISESINNIVDHAIKSKDHATFNFLQWYVAEQHEEEVLFKDILDKIELIGNENHGLYLADQYVKGIAKSRKSGS

SEQ ID NO: 243 - protein, 1329 aa, Artificial Sequence
  Description of Artificial Sequence: Synthetic polypeptide
SSQCVNFTTRTQLPPAYTNSFTRGVYYPDKVFRSSVLHSTQDLFLPFFSNVTWFHAIHVSGTNGTKRFDNPVLPFNDGVYFASTEKSNIIRGWIFGTTLDSKTQSLLIVNNATNVVIKVCEFQFCNDPFLGVYYHKNNKSWMESEFRVYSSANNCTFEYVSQPFLMDLEGKQGNFKNLREFVFKNIDGYFKIYSKHTPINLVRGLPQGFSALEPLVDLPIGINITRFQTLHRSYLTPGDSSSGWTAGAAAYYVGYLQPRTFLLKYNENGTITDAVDCALDPLSETKCTLKSFTVEKGIYQTSNFRVQPTESIVRFPNITNLCPFGEVFNATRFASVYAWNRKRISNCVADYSVLYNSASFSTFKCYGVSPTKLNDLCFTNVYADSFVIRGDEVRQIAPGQTGNIADYNYKLPDDFTGCVIAWNSNNLDSKVGGNYNYLYRLFRKSNLKPFERDISTEIYQAGSTPCNGVKGFNCYFPLQSYGFQPTYGVGYQPYRVVVLSFELLHAPATVCGPKKSTNLVKNKCVNFNFNGLTGTGVLTESNKKFLPFQQFGRDIADTTDAVRDPQTLEILDITPCSFGGVSVITPGTNTSNQVAVLYQGVNCTEVPVAIHADQLTPTWRVYSTGSNVFQTRAGCLIGAEHVNNSYECDIPIGAGICASYQTQTNSPGSASSVASQSIIAYTMSLGVENSVAYSNNSIAIPTNFTISVTTEILPVSMTKTSVDCTMYICGDSTECSNLLLQYGSFCTQLNRALTGIAVEQDKNTQEVFAQVKQIYKTPPIKDFGGFNFSQILPDPSKPSKRSFIEDLLFNKVTLADAGFIKQYGDCLGDIAARDLICAQKFNGLTVLPPLLTDEMIAQYTSALLAGTITSGWTFGAGAALQIPFAMQMAYRFNGIGVTQNVLYENQKLIANQFNSAIGKIQDSLSSTASALGKLQDVVNQNAQALNTLVKQLSSNFGAISSVLNDILSRLDPPEAEVQIDRLITGRLQSLQTYVTQQLIRAAEIRASANLAATKMSECVLGQSKRVDFCGKGYHLMSFPQSAPHGVVFLHVTYVPAQEKNFTTAPAICHDGKAHFPREGVFVSNGTHWFVTQRNFYEPQIITTDNTFVSGNCDVVIGIVNNTVYDPLQSELDSIKEELDKIHKNLDSIKEELDKIHKNGSGGSGDIIKLLNEQVNKEMQSSNLYMSMSSWCYTHSLDGAGLFLFDHAAEEYEHAKKLIIFLNENNVPVQLTSISAPEHKFEGLTQIFQKAYEHEQHISESINNIVDHAIKSKDHATFNFLQWYVAEQHEEEVLFKDILDKIELIGNENHGLYLADQYVKGIAKSRKSGS

SEQ ID NO: 244 - protein, 1329 aa, Artificial Sequence
  Description of Artificial Sequence: Synthetic polypeptide
SSQCVNFTTRTQLPPAYTNSFTRGVYYPDKVFRSSVLHSTQDLFLPFFSNVTWFHAIHVSGTNGTKRFANPVLPFNDGVYFASTEKSNIIRGWIFGTTLDSKTQSLLIVNNATNVVIKVCEFQFCNDPFLGVYYHKNNKSWMESEFRVYSSANNCTFEYVSQPFLMDLEGKQGNFKNLREFVFKNIDGYFKIYSKHTPINLVRDLPQGFSALEPLVDLPIGINITRFQTLHRSYLTPGDSSSGWTAGAAAYYVGYLQPRTFLLKYNENGTITDAVDCALDPLSETKCTLKSFTVEKGIYQTSNFRVQPTESIVRFPNITNLCPFGEVFNATRFASVYAWNRKRISNCVADYSVLYNSASFSTFKCYGVSPTKLNDLCFTNVYADSFVIRGDEVRQIAPGQTGNIADYNYKLPDDFTGCVIAWNSNNLDSKVGGNYNYLYRLFRKSNLKPFERDISTEIYQAGSTPCNGVKGFNCYFPLQSYGFQPTYGVGYQPYRVVVLSFELLHAPATVCGPKKSTNLVKNKCVNFNFNGLTGTGVLTESNKKFLPFQQFGRDIADTTDAVRDPQTLEILDITPCSFGGVSVITPGTNTSNQVAVLYQGVNCTEVPVAIHADQLTPTWRVYSTGSNVFQTRAGCLIGAEHVNNSYECDIPIGAGICASYQTQTNSPGSASSVASQSIIAYTMSLGVENSVAYSNNSIAIPTNFTISVTTEILPVSMTKTSVDCTMYICGDSTECSNLLLQYGSFCTQLNRALTGIAVEQDKNTQEVFAQVKQIYKTPPIKDFGGFNFSQILPDPSKPSKRSFIEDLLFNKVTLADAGFIKQYGDCLGDIAARDLICAQKFNGLTVLPPLLTDEMIAQYTSALLAGTITSGWTFGAGAALQIPFAMQMAYRFNGIGVTQNVLYENQKLIANQFNSAIGKIQDSLSSTASALGKLQDVVNQNAQALNTLVKQLSSNFGAISSVLNDILSRLDPPEAEVQIDRLITGRLQSLQTYVTQQLIRAAEIRASANLAATKMSECVLGQSKRVDFCGKGYHLMSFPQSAPHGVVFLHVTYVPAQEKNFTTAPAICHDGKAHFPREGVFVSNGTHWFVTQRNFYEPQIITTDNTFVSGNCDVVIGIVNNTVYDPLQSELDSIKEELDKIHKNLDSIKEELDKIHKNGSGGSGDIIKLLNEQVNKEMQSSNLYMSMSSWCYTHSLDGAGLFLFDHAAEEYEHAKKLIIFLNENNVPVQLTSISAPEHKFEGLTQIFQKAYEHEQHISESINNIVDHAIKSKDHATFNFLQWYVAEQHEEEVLFKDILDKIELIGNENHGLYLADQYVKGIAKSRKSGS

SEQ ID NO: 245 - protein, 1332 aa, Artificial Sequence
  Description of Artificial Sequence: Synthetic polypeptide
SSQCVNFTNRTQLPSAYTNSFTRGVYYPDKVFRSSVLHSTQDLFLPFFSNVTWFHAIHVSGTNGTKRFDNPVLPFNDGVYFASTEKSNIIRGWIFGTTLDSKTQSLLIVNNATNVVIKVCEFQFCNYPFLGVYYHKNNKSWMESEFRVYSSANNCTFEYVSQPFLMDLEGKQGNFKNLSEFVFKNIDGYFKIYSKHTPINLVRDLPQGFSALEPLVDLPIGINITRFQTLLALHRSYLTPGDSSSGWTAGAAAYYVGYLQPRTFLLKYNENGTITDAVDCALDPLSETKCTLKSFTVEKGIYQTSNFRVQPTESIVRFPNITNLCPFGEVFNATRFASVYAWNRKRISNCVADYSVLYNSASFSTFKCYGVSPTKLNDLCFTNVYADSFVIRGDEVRQIAPGQTGTIADYNYKLPDDFTGCVIAWNSNNLDSKVGGNYNYLYRLFRKSNLKPFERDISTEIYQAGSTPCNGVKGFNCYFPLQSYGFQPTYGVGYQPYRVVVLSFELLHAPATVCGPKKSTNLVKNKCVNFNFNGLTGTGVLTESNKKFLPFQQFGRDIADTTDAVRDPQTLEILDITPCSFGGVSVITPGTNTSNQVAVLYQGVNCTEVPVAIHADQLTPTWRVYSTGSNVFQTRAGCLIGAEYVNNSYECDIPIGAGICASYQTQTNSPGSASSVASQSIIAYTMSLGAENSVAYSNNSIAIPTNFTISVTTEILPVSMTKTSVDCTMYICGDSTECSNLLLQYGSFCTQLNRALTGIAVEQDKNTQEVFAQVKQIYKTPPIKDFGGFNFSQILPDPSKPSKRSFIEDLLFNKVTLADAGFIKQYGDCLGDIAARDLICAQKFNGLTVLPPLLTDEMIAQYTSALLAGTITSGWTFGAGAALQIPFAMQMAYRFNGIGVTQNVLYENQKLIANQFNSAIGKIQDSLSSTASALGKLQDVVNQNAQALNTLVKQLSSNFGAISSVLNDILSRLDPPEAEVQIDRLITGRLQSLQTYVTQQLIRAAEIRASANLAAIKMSECVLGQSKRVDFCGKGYHLMSFPQSAPHGVVFLHVTYVPAQEKNFTTAPAICHDGKAHFPREGVFVSNGTHWFVTQRNFYEPQIITTDNTFVSGNCDVVIGIVNNTVYDPLQSELDSIKEELDKIHKNLDSIKEELDKIHKNGSGGSGDIIKLLNEQVNKEMQSSNLYMSMSSWCYTHSLDGAGLFLFDHAAEEYEHAKKLIIFLNENNVPVQLTSISAPEHKFEGLTQIFQKAYEHEQHISESINNIVDHAIKSKDHATFNFLQWYVAEQHEEEVLFKDILDKIELIGNENHGLYLADQYVKGIAKSRKSGS

SEQ ID NO: 246 - protein, 1315 aa, Artificial Sequence
  Description of Artificial Sequence: Synthetic polypeptide
SSQCVNLTTRTQLPPAYTNSFTRGVYYPDKVFRSSVLHSTQDLFLPFFSNVTWFHAISGTNGTKRFDNPVLPFNDGVYFASTEKSNIIRGWIFGTTLDSKTQSLLIVNNATNVVIKVCEFQFCNDPFLGVYHKNNKSWMESEFRVYSSANNCTFEYVSQPFLMDLEGKQGNFKNLREFVFKNIDGYFKIYSKHTPINLVRDLPQGFSALEPLVDLPIGINITRFQTLLALHRSYLTPGDSSSGWTAGAAAYYVGYLQPRTFLLKYNENGTITDAVDCALDPLSETKCTLKSFTVEKGIYQTSNFRVQPTESIVRFPNITNLCPFGEVFNATRFASVYAWNRKRISNCVADYSVLYNSASFSTFKCYGVSPTKLNDLCFTNVYADSFVIRGDEVRQIAPGQTGKIADYNYKLPDDFTGCVIAWNSNNLDSKVGGNYNYLYRLFRKSNLKPFERDISTEIYQAGSTPCNGVEGFNCYFPLQSYGFQPTYGVGYQPYRVVVLSFELLHAPATVCGPKKSTNLVKNKCVNFNFNGLTGTGVLTESNKKFLPFQQFGRDIDDTTDAVRDPQTLEILDITPCSFGGVSVITPGTNTSNQVAVLYQGVNCTEVPVAIHADQLTPTWRVYSTGSNVFQTRAGCLIGAEHVNNSYECDIPIGAGICASYQTQTNSHGSASSVASQSIIAYTMSLGAENSVAYSNNSIAIPINFTISVTTEILPVSMTKTSVDCTMYICGDSTECSNLLLQYGSFCTQLNRALTGIAVEQDKNTQEVFAQVKQIYKTPPIKDFGGFNFSQILPDPSKPSKRSPIEDLLFNKVTLADAGFIKQYGDCLGDIAARDLICAQKFNGLTVLPPLLTDEMIAQYTSALLAGTITSGWTFGAGPALQIPFPMQMAYRFNGIGVTQNVLYENQKLIANQFNSAIGKIQDSLSSTPSALGKLQDVVNQNAQALNTLVKQLSSNFGAISSVLNDILARLDPPEAEVQIDRLITGRLQSLQTYVTQQLIRAAEIRASANLAATKMSECVLGQSKRVDFCGKGYHLMSFPQSAPHGVVFLHVTYVPAQEKNFTTAPAICHDGKAHFPREGVFVSNGTHWFVTQRNFYEPQIITTHNTFVSGNCDVVIGIVNNTVYDPLQSELDSIKEELDKIHKNGSGGSGDIIKLLNEQVNKEMQSSNLYMSMSSWCYTHSLDGAGLFLFDHAAEEYEHAKKLIIFLNENNVPVQLTSISAPEHKFEGLTQIFQKAYEHEQHISESINNIVDHAIKSKDHATFNFLQWYVAEQHEEEVLFKDILDKIELIGNENHGLYLADQYVKGIAKSRKSGS

SEQ ID NO: 247 - protein, 1315 aa, Artificial Sequence
  Description of Artificial Sequence: Synthetic polypeptide
SSQCVNFTTRTQLPPAYTNSFTRGVYYPDKVFRSSVLHSTQDLFLPFFSNVTWFHAIHVSGTNGTKRFANPVLPFNDGVYFASTEKSNIIRGWIFGTTLDSKTQSLLIVNNATNVVIKVCEFQFCNDPFLGVYYHKNNKSWMESEFRVYSSANNCTFEYVSQPFLMDLEGKQGNFKNLREFVFKNIDGYFKIYSKHTPINLVRGLPQGFSALEPLVDLPIGINITRFQTLHISYLTPGDSSSGWTAGAAAYYVGYLQPRTFLLKYNENGTITDAVDCALDPLSETKCTLKSFTVEKGIYQTSNFRVQPTESIVRFPNITNLCPFGEVFNATRFASVYAWNRKRISNCVADYSVLYNSASFSTFKCYGVSPTKLNDLCFTNVYADSFVIRGDEVRQIAPGQTGNIADYNYKLPDDFTGCVIAWNSNNLDSKVGGNYNYLYRLFRKSNLKPFERDISTEIYQAGSTPCNGVKGFNCYFPLQSYGFQPTYGVGYQPYRVVVLSFELLHAPATVCGPKKSTNLVKNKCVNFNFNGLTGTGVLTESNKKFLPFQQFGRDIADTTDAVRDPQTLEILDITPCSFGGVSVITPGTNTSNQVAVLYQGVNCTEVPVAIHADQLTPTWRVYSTGSNVFQTRAGCLIGAEHVNNSYECDIPIGAGICASYQTQTNSPGSASSVASQSIIAYTMSLGVENSVAYSNNSIAIPTNFTISVTTEILPVSMTKTSVDCTMYICGDSTECSNLLLQYGSFCTQLNRALTGIAVEQDKNTQEVFAQVKQIYKTPPIKDFGGFNFSQILPDPSKPSKRSPIEDLLFNKVTLADAGFIKQYGDCLGDIAARDLICAQKFNGLTVLPPLLTDEMIAQYTSALLAGTITSGWTFGAGPALQIPFPMQMAYRFNGIGVTQNVLYENQKLIANQFNSAIGKIQDSLSSTPSALGKLQDVVNQNAQALNTLVKQLSSNFGAISSVLNDILSRLDPPEAEVQIDRLITGRLQSLQTYVTQQLIRAAEIRASANLAATKMSECVLGQSKRVDFCGKGYHLMSFPQSAPHGVVFLHVTYVPAQEKNFTTAPAICHDGKAHFPREGVFVSNGTHWFVTQRNFYEPQIITTDNTFVSGNCDVVIGIVNNTVYDPLQSELDSIKEELDKIHKNGSGGSGDIIKLLNEQVNKEMQSSNLYMSMSSWCYTHSLDGAGLFLFDHAAEEYEHAKKLIIFLNENNVPVQLTSISAPEHKFEGLTQIFQKAYEHEQHISESINNIVDHAIKSKDHATFNFLQWYVAEQHEEEVLFKDILDKIELIGNENHGLYLADQYVKGIAKSRKSGS

SEQ ID NO: 248 - protein, 1315 aa, Artificial Sequence
  Description of Artificial Sequence: Synthetic polypeptide
SSQCVNFTTRTQLPPAYTNSFTRGVYYPDKVFRSSVLHSTQDLFLPFFSNVTWFHAIHVSGTNGTKRFDNPVLPFNDGVYFASTEKSNIIRGWIFGTTLDSKTQSLLIVNNATNVVIKVCEFQFCNDPFLGVYYHKNNKSWMESEFRVYSSANNCTFEYVSQPFLMDLEGKQGNFKNLREFVFKNIDGYFKIYSKHTPINLVRGLPQGFSALEPLVDLPIGINITRFQTLHISYLTPGDSSSGWTAGAAAYYVGYLQPRTFLLKYNENGTITDAVDCALDPLSETKCTLKSFTVEKGIYQTSNFRVQPTESIVRFPNITNLCPFGEVFNATRFASVYAWNRKRISNCVADYSVLYNSASFSTFKCYGVSPTKLNDLCFTNVYADSFVIRGDEVRQIAPGQTGNIADYNYKLPDDFTGCVIAWNSNNLDSKVGGNYNYLYRLFRKSNLKPFERDISTEIYQAGSTPCNGVKGFNCYFPLQSYGFQPTYGVGYQPYRVVVLSFELLHAPATVCGPKKSTNLVKNKCVNFNFNGLTGTGVLTESNKKFLPFQQFGRDIADTTDAVRDPQTLEILDITPCSFGGVSVITPGTNTSNQVAVLYQGVNCTEVPVAIHADQLTPTWRVYSTGSNVFQTRAGCLIGAEHVNNSYECDIPIGAGICASYQTQTNSPGSASSVASQSIIAYTMSLGVENSVAYSNNSIAIPTNFTISVTTEILPVSMTKTSVDCTMYICGDSTECSNLLLQYGSFCTQLNRALTGIAVEQDKNTQEVFAQVKQIYKTPPIKDFGGFNFSQILPDPSKPSKRSPIEDLLFNKVTLADAGFIKQYGDCLGDIAARDLICAQKFNGLTVLPPLLTDEMIAQYTSALLAGTITSGWTFGAGPALQIPFPMQMAYRFNGIGVTQNVLYENQKLIANQFNSAIGKIQDSLSSTPSALGKLQDVVNQNAQALNTLVKQLSSNFGAISSVLNDILSRLDPPEAEVQIDRLITGRLQSLQTYVTQQLIRAAEIRASANLAATKMSECVLGQSKRVDFCGKGYHLMSFPQSAPHGVVFLHVTYVPAQEKNFTTAPAICHDGKAHFPREGVFVSNGTHWFVTQRNFYEPQIITTDNTFVSGNCDVVIGIVNNTVYDPLQSELDSIKEELDKIHKNGSGGSGDIIKLLNEQVNKEMQSSNLYMSMSSWCYTHSLDGAGLFLFDHAAEEYEHAKKLIIFLNENNVPVQLTSISAPEHKFEGLTQIFQKAYEHEQHISESINNIVDHAIKSKDHATFNFLQWYVAEQHEEEVLFKDILDKIELIGNENHGLYLADQYVKGIAKSRKSGS

SEQ ID NO: 249 - protein, 1315 aa, Artificial Sequence
  Description of Artificial Sequence: Synthetic polypeptide
SSQCVNFTTRTQLPPAYTNSFTRGVYYPDKVFRSSVLHSTQDLFLPFFSNVTWFHAIHVSGTNGTKRFANPVLPFNDGVYFASTEKSNIIRGWIFGTTLDSKTQSLLIVNNATNVVIKVCEFQFCNDPFLGVYYHKNNKSWMESEFRVYSSANNCTFEYVSQPFLMDLEGKQGNFKNLREFVFKNIDGYFKIYSKHTPINLVRDLPQGFSALEPLVDLPIGINITRFQTLHISYLTPGDSSSGWTAGAAAYYVGYLQPRTFLLKYNENGTITDAVDCALDPLSETKCTLKSFTVEKGIYQTSNFRVQPTESIVRFPNITNLCPFGEVFNATRFASVYAWNRKRISNCVADYSVLYNSASFSTFKCYGVSPTKLNDLCFTNVYADSFVIRGDEVRQIAPGQTGNIADYNYKLPDDFTGCVIAWNSNNLDSKVGGNYNYLYRLFRKSNLKPFERDISTEIYQAGSTPCNGVKGFNCYFPLQSYGFQPTYGVGYQPYRVVVLSFELLHAPATVCGPKKSTNLVKNKCVNFNFNGLTGTGVLTESNKKFLPFQQFGRDIADTTDAVRDPQTLEILDITPCSFGGVSVITPGTNTSNQVAVLYQGVNCTEVPVAIHADQLTPTWRVYSTGSNVFQTRAGCLIGAEHVNNSYECDIPIGAGICASYQTQTNSPGSASSVASQSIIAYTMSLGVENSVAYSNNSIAIPTNFTISVTTEILPVSMTKTSVDCTMYICGDSTECSNLLLQYGSFCTQLNRALTGIAVEQDKNTQEVFAQVKQIYKTPPIKDFGGFNFSQILPDPSKPSKRSPIEDLLFNKVTLADAGFIKQYGDCLGDIAARDLICAQKFNGLTVLPPLLTDEMIAQYTSALLAGTITSGWTFGAGPALQIPFPMQMAYRFNGIGVTQNVLYENQKLIANQFNSAIGKIQDSLSSTPSALGKLQDVVNQNAQALNTLVKQLSSNFGAISSVLNDILSRLDPPEAEVQIDRLITGRLQSLQTYVTQQLIRAAEIRASANLAATKMSECVLGQSKRVDFCGKGYHLMSFPQSAPHGVVFLHVTYVPAQEKNFTTAPAICHDGKAHFPREGVFVSNGTHWFVTQRNFYEPQIITTDNTFVSGNCDVVIGIVNNTVYDPLQSELDSIKEELDKIHKNGSGGSGDIIKLLNEQVNKEMQSSNLYMSMSSWCYTHSLDGAGLFLFDHAAEEYEHAKKLIIFLNENNVPVQLTSISAPEHKFEGLTQIFQKAYEHEQHISESINNIVDHAIKSKDHATFNFLQWYVAEQHEEEVLFKDILDKIELIGNENHGLYLADQYVKGIAKSRKSGS

SEQ ID NO: 250 - protein, 1315 aa, Artificial Sequence
  Description of Artificial Sequence: Synthetic polypeptide
SSQCVNFTTRTQLPPAYTNSFTRGVYYPDKVFRSSVLHSTQDLFLPFFSNVTWFHAIHVSGTNGTKRFANPVLPFNDGVYFASTEKSNIIRGWIFGTTLDSKTQSLLIVNNATNVVIKVCEFQFCNDPFLGVYYHKNNKSWMESEFRVYSSANNCTFEYVSQPFLMDLEGKQGNFKNLREFVFKNIDGYFKIYSKHTPINLVRGLPQGFSALEPLVDLPIGINITRFQTLHRSYLTPGDSSSGWTAGAAAYYVGYLQPRTFLLKYNENGTITDAVDCALDPLSETKCTLKSFTVEKGIYQTSNFRVQPTESIVRFPNITNLCPFGEVFNATRFASVYAWNRKRISNCVADYSVLYNSASFSTFKCYGVSPTKLNDLCFTNVYADSFVIRGDEVRQIAPGQTGNIADYNYKLPDDFTGCVIAWNSNNLDSKVGGNYNYLYRLFRKSNLKPFERDISTEIYQAGSTPCNGVKGFNCYFPLQSYGFQPTYGVGYQPYRVVVLSFELLHAPATVCGPKKSTNLVKNKCVNFNFNGLTGTGVLTESNKKFLPFQQFGRDIADTTDAVRDPQTLEILDITPCSFGGVSVITPGTNTSNQVAVLYQGVNCTEVPVAIHADQLTPTWRVYSTGSNVFQTRAGCLIGAEHVNNSYECDIPIGAGICASYQTQTNSPGSASSVASQSIIAYTMSLGVENSVAYSNNSIAIPTNFTISVTTEILPVSMTKTSVDCTMYICGDSTECSNLLLQYGSFCTQLNRALTGIAVEQDKNTQEVFAQVKQIYKTPPIKDFGGFNFSQILPDPSKPSKRSPIEDLLFNKVTLADAGFIKQYGDCLGDIAARDLICAQKFNGLTVLPPLLTDEMIAQYTSALLAGTITSGWTFGAGPALQIPFPMQMAYRFNGIGVTQNVLYENQKLIANQFNSAIGKIQDSLSSTPSALGKLQDVVNQNAQALNTLVKQLSSNFGAISSVLNDILSRLDPPEAEVQIDRLITGRLQSLQTYVTQQLIRAAEIRASANLAATKMSECVLGQSKRVDFCGKGYHLMSFPQSAPHGVVFLHVTYVPAQEKNFTTAPAICHDGKAHFPREGVFVSNGTHWFVTQRNFYEPQIITTDNTFVSGNCDVVIGIVNNTVYDPLQSELDSIKEELDKIHKNGSGGSGDIIKLLNEQVNKEMQSSNLYMSMSSWCYTHSLDGAGLFLFDHAAEEYEHAKKLIIFLNENNVPVQLTSISAPEHKFEGLTQIFQKAYEHEQHISESINNIVDHAIKSKDHATFNFLQWYVAEQHEEEVLFKDILDKIELIGNENHGLYLADQYVKGIAKSRKSGS

SEQ ID NO: 251 - protein, 1315 aa, Artificial Sequence
  Description of Artificial Sequence: Synthetic polypeptide
SSQCVNFTTRTQLPPAYTNSFTRGVYYPDKVFRSSVLHSTQDLFLPFFSNVTWFHAIHVSGTNGTKRFDNPVLPFNDGVYFASTEKSNIIRGWIFGTTLDSKTQSLLIVNNATNVVIKVCEFQFCNDPFLGVYYHKNNKSWMESEFRVYSSANNCTFEYVSQPFLMDLEGKQGNFKNLREFVFKNIDGYFKIYSKHTPINLVRGLPQGFSALEPLVDLPIGINITRFQTLHRSYLTPGDSSSGWTAGAAAYYVGYLQPRTFLLKYNENGTITDAVDCALDPLSETKCTLKSFTVEKGIYQTSNFRVQPTESIVRFPNITNLCPFGEVFNATRFASVYAWNRKRISNCVADYSVLYNSASFSTFKCYGVSPTKLNDLCFTNVYADSFVIRGDEVRQIAPGQTGNIADYNYKLPDDFTGCVIAWNSNNLDSKVGGNYNYLYRLFRKSNLKPFERDISTEIYQAGSTPCNGVKGFNCYFPLQSYGFQPTYGVGYQPYRVVVLSFELLHAPATVCGPKKSTNLVKNKCVNFNFNGLTGTGVLTESNKKFLPFQQFGRDIADTTDAVRDPQTLEILDITPCSFGGVSVITPGTNTSNQVAVLYQGVNCTEVPVAIHADQLTPTWRVYSTGSNVFQTRAGCLIGAEHVNNSYECDIPIGAGICASYQTQTNSPGSASSVASQSIIAYTMSLGVENSVAYSNNSIAIPTNFTISVTTEILPVSMTKTSVDCTMYICGDSTECSNLLLQYGSFCTQLNRALTGIAVEQDKNTQEVFAQVKQIYKTPPIKDFGGFNFSQILPDPSKPSKRSPIEDLLFNKVTLADAGFIKQYGDCLGDIAARDLICAQKFNGLTVLPPLLTDEMIAQYTSALLAGTITSGWTFGAGPALQIPFPMQMAYRFNGIGVTQNVLYENQKLIANQFNSAIGKIQDSLSSTPSALGKLQDVVNQNAQALNTLVKQLSSNFGAISSVLNDILSRLDPPEAEVQIDRLITGRLQSLQTYVTQQLIRAAEIRASANLAATKMSECVLGQSKRVDFCGKGYHLMSFPQSAPHGVVFLHVTYVPAQEKNFTTAPAICHDGKAHFPREGVFVSNGTHWFVTQRNFYEPQIITTDNTFVSGNCDVVIGIVNNTVYDPLQSELDSIKEELDKIHKNGSGGSGDIIKLLNEQVNKEMQSSNLYMSMSSWCYTHSLDGAGLFLFDHAAEEYEHAKKLIIFLNENNVPVQLTSISAPEHKFEGLTQIFQKAYEHEQHISESINNIVDHAIKSKDHATFNFLQWYVAEQHEEEVLFKDILDKIELIGNENHGLYLADQYVKGIAKSRKSGS

SEQ ID NO: 252 - protein, 1315 aa, Artificial Sequence
  Description of Artificial Sequence: Synthetic polypeptide
SSQCVNFTTRTQLPPAYTNSFTRGVYYPDKVFRSSVLHSTQDLFLPFFSNVTWFHAIHVSGTNGTKRFANPVLPFNDGVYFASTEKSNIIRGWIFGTTLDSKTQSLLIVNNATNVVIKVCEFQFCNDPFLGVYYHKNNKSWMESEFRVYSSANNCTFEYVSQPFLMDLEGKQGNFKNLREFVFKNIDGYFKIYSKHTPINLVRDLPQGFSALEPLVDLPIGINITRFQTLHRSYLTPGDSSSGWTAGAAAYYVGYLQPRTFLLKYNENGTITDAVDCALDPLSETKCTLKSFTVEKGIYQTSNFRVQPTESIVRFPNITNLCPFGEVFNATRFASVYAWNRKRISNCVADYSVLYNSASFSTFKCYGVSPTKLNDLCFTNVYADSFVIRGDEVRQIAPGQTGNIADYNYKLPDDFTGCVIAWNSNNLDSKVGGNYNYLYRLFRKSNLKPFERDISTEIYQAGSTPCNGVKGFNCYFPLQSYGFQPTYGVGYQPYRVVVLSFELLHAPATVCGPKKSTNLVKNKCVNFNFNGLTGTGVLTESNKKFLPFQQFGRDIADTTDAVRDPQTLEILDITPCSFGGVSVITPGTNTSNQVAVLYQGVNCTEVPVAIHADQLTPTWRVYSTGSNVFQTRAGCLIGAEHVNNSYECDIPIGAGICASYQTQTNSPGSASSVASQSIIAYTMSLGVENSVAYSNNSIAIPTNFTISVTTEILPVSMTKTSVDCTMYICGDSTECSNLLLQYGSFCTQLNRALTGIAVEQDKNTQEVFAQVKQIYKTPPIKDFGGFNFSQILPDPSKPSKRSPIEDLLFNKVTLADAGFIKQYGDCLGDIAARDLICAQKFNGLTVLPPLLTDEMIAQYTSALLAGTITSGWTFGAGPALQIPFPMQMAYRFNGIGVTQNVLYENQKLIANQFNSAIGKIQDSLSSTPSALGKLQDVVNQNAQALNTLVKQLSSNFGAISSVLNDILSRLDPPEAEVQIDRLITGRLQSLQTYVTQQLIRAAEIRASANLAATKMSECVLGQSKRVDFCGKGYHLMSFPQSAPHGVVFLHVTYVPAQEKNFTTAPAICHDGKAHFPREGVFVSNGTHWFVTQRNFYEPQIITTDNTFVSGNCDVVIGIVNNTVYDPLQSELDSIKEELDKIHKNGSGGSGDIIKLLNEQVNKEMQSSNLYMSMSSWCYTHSLDGAGLFLFDHAAEEYEHAKKLIIFLNENNVPVQLTSISAPEHKFEGLTQIFQKAYEHEQHISESINNIVDHAIKSKDHATFNFLQWYVAEQHEEEVLFKDILDKIELIGNENHGLYLADQYVKGIAKSRKSGS

SEQ ID NO: 253 - protein, 1318 aa, Artificial Sequence
  Description of Artificial Sequence: Synthetic polypeptide
SSQCVNFTNRTQLPSAYTNSFTRGVYYPDKVFRSSVLHSTQDLFLPFFSNVTWFHAIHVSGTNGTKRFDNPVLPFNDGVYFASTEKSNIIRGWIFGTTLDSKTQSLLIVNNATNVVIKVCEFQFCNYPFLGVYYHKNNKSWMESEFRVYSSANNCTFEYVSQPFLMDLEGKQGNFKNLSEFVFKNIDGYFKIYSKHTPINLVRDLPQGFSALEPLVDLPIGINITRFQTLLALHRSYLTPGDSSSGWTAGAAAYYVGYLQPRTFLLKYNENGTITDAVDCALDPLSETKCTLKSFTVEKGIYQTSNFRVQPTESIVRFPNITNLCPFGEVFNATRFASVYAWNRKRISNCVADYSVLYNSASFSTFKCYGVSPTKLNDLCFTNVYADSFVIRGDEVRQIAPGQTGTIADYNYKLPDDFTGCVIAWNSNNLDSKVGGNYNYLYRLFRKSNLKPFERDISTEIYQAGSTPCNGVKGFNCYFPLQSYGFQPTYGVGYQPYRVVVLSFELLHAPATVCGPKKSTNLVKNKCVNFNFNGLTGTGVLTESNKKFLPFQQFGRDIADTTDAVRDPQTLEILDITPCSFGGVSVITPGTNTSNQVAVLYQGVNCTEVPVAIHADQLTPTWRVYSTGSNVFQTRAGCLIGAEYVNNSYECDIPIGAGICASYQTQTNSPGSASSVASQSIIAYTMSLGAENSVAYSNNSIAIPTNFTISVTTEILPVSMTKTSVDCTMYICGDSTECSNLLLQYGSFCTQLNRALTGIAVEQDKNTQEVFAQVKQIYKTPPIKDFGGFNFSQILPDPSKPSKRSPIEDLLFNKVTLADAGFIKQYGDCLGDIAARDLICAQKFNGLTVLPPLLTDEMIAQYTSALLAGTITSGWTFGAGPALQIPFPMQMAYRFNGIGVTQNVLYENQKLIANQFNSAIGKIQDSLSSTPSALGKLQDVVNQNAQALNTLVKQLSSNFGAISSVLNDILSRLDPPEAEVQIDRLITGRLQSLQTYVTQQLIRAAEIRASANLAAIKMSECVLGQSKRVDFCGKGYHLMSFPQSAPHGVVFLHVTYVPAQEKNFTTAPAICHDGKAHFPREGVFVSNGTHWFVTQRNFYEPQIITTDNTFVSGNCDVVIGIVNNTVYDPLQSELDSIKEELDKIHKNGSGGSGDIIKLLNEQVNKEMQSSNLYMSMSSWCYTHSLDGAGLFLFDHAAEEYEHAKKLIIFLNENNVPVQLTSISAPEHKFEGLTQIFQKAYEHEQHISESINNIVDHAIKSKDHATFNFLQWYVAEQHEEEVLFKDILDKIELIGNENHGLYLADQYVKGIAKSRKSGS

SEQ ID NO: 254 - protein, 1332 aa, Artificial Sequence
  Description of Artificial Sequence: Synthetic polypeptide
SSQCVNLTTRTQLPPAYTNSFTRGVYYPDKVFRSSVLHSTQDLFLPFFSNVTWFHAIHVSGTNGTKRFDNPVLPFNDGVYFASTEKSNIIRGWIFGTTLDSKTQSLLIVNNATNVVIKVCEFQFCNDPFLGVYYHKNNKSWMESEFRVYSSANNCTFEYVSQPFLMDLEGKQGNFKNLREFVFKNIDGYFKIYSKHTPINLVRDLPQGFSALEPLVDLPIGINITRFQTLLALHRSYLTPGDSSSGWTAGAAAYYVGYLQPRTFLLKYNENGTITDAVDCALDPLSETKCTLKSFTVEKGIYQTSNFRVQPTESIVRFPNITNLCPFGEVFNATRFASVYAWNRKRISNCVADYSVLYNSASFSTFKCYGVSPTKLNDLCFTNVYADSFVIRGDEVRQIAPGQTGKIADYNYKLPDDFTGCVIAWNSNNLDSKVGGNYNYLYRLFRKSNLKPFERDISTEIYQAGSTPCNGVEGFNCYFPLQSYGFQPTNGVGYQPYRVVVLSFELLHAPATVCGPKKSTNLVKNKCVNFNFNGLTGTGVLTESNKKFLPFQQFGRDIADTTDAVRDPQTLEILDITPCSFGGVSVITPGTNTSNQVAVLYQDVNCTEVPVAIHADQLTPTWRVYSTGSNVFQTRAGCLIGAEHVNNSYECDIPIGAGICASYQTQTNSPGSASSVASQSIIAYTMSLGAENSVAYSNNSIAIPTNFTISVTTEILPVSMTKTSVDCTMYICGDSTECSNLLLQYGSFCTQLNRALTGIAVEQDKNTQEVFAQVKQIYKTPPIKDFGGFNFSQILPDPSKPSKRSFIEDLLFNKVTLADAGFIKQYGDCLGDIAARDLICAQKFNGLTVLPPLLTDEMIAQYTSALLAGTITSGWTFGAGAALQIPFAMQMAYRFNGIGVTQNVLYENQKLIANQFNSAIGKIQDSLSSTASALGKLQDVVNQNAQALNTLVKQLSSNFGAISSVLNDILSRLDPPEAEVQIDRLITGRLQSLQTYVTQQLIRAAEIRASANLAATKMSECVLGQSKRVDFCGKGYHLMSFPQSAPHGVVFLHVTYVPAQEKNFTTAPAICHDGKAHFPREGVFVSNGTHWFVTQRNFYEPQIITTDNTFVSGNCDVVIGIVNNTVYDPLQSELDSIKEELDKIHKNLTSIKEELDKIHKNGSGGSGDIIKLLNEQVNKEMQSSNLYMSMSSWCYTHSLDGAGLFLFDHAAEEYEHAKKLIIFLNENNVPVQLTSISAPEHKFEGLTQIFQKAYEHEQHISESINNIVDHAIKSKDHATFNFLQWYVAEQHEEEVLFKDILDKIELIGNENHGLYLADQYVKGIAKSRKSGS

SEQ ID NO: 255 - protein, 1298 aa, Artificial Sequence
  Description of Artificial Sequence: Synthetic polypeptide
SDLDRCTTFDDVQAPNYTQHTSSMRGVYYPDEIFRSDTLYLTQDLFLPFYSNVTGFHTINHTFGNPVIPFKDGIYFAATEKSNVVRGWVFGSTMNNKSQSVIIINNSTNVVIRACNFELCDNPFFAVSKPMGTQTHTMIFDNAFNCTFEYISDAFSLDVSEKSGNFKHLREFVFKNKDGFLYVYKGYQPIDVVRDLPSGFNTLKPIFKLPLGINITNFRAILTAFSPAQDIWGTSAAAYFVGYLKPTTFMLKYDENGTITDAVDCSQNPLAELKCSVKSFEIDKGIYQTSNFRVVPSGDVVRFPNITNLCPFGEVFNATKFPSVYAWERKKISNCVADYSVLYNSTFFSTFKCYGVSATKLNDLCFSNVYADSFVVKGDDVRQIAPGQTGVIADYNYKLPDDFMGCVLAWNTRNIDATSTGNYNYKYRYLRHGKLRPFERDISNVPFSPDGKPCTPPALNCYWPLNDYGFYTTTGIGYQPYRVVVLSFELLNAPATVCGPKLSTDLIKNQCVNFNFNGLTGTGVLTPSSKRFQPFQQFGRDVSDFTDSVRDPKTSEILDISPCAFGGVSVITPGTNASSEVAVLYQDVNCTDVSTAIHADQLTPAWRIYSTGNNVFQTQAGCLIGAEHVDTSYECDIPIGAGICASYHTVSLLRSTSQKSIVAYTMSLGADSSIAYSNNTIAIPTNFSISITTEVMPVSMAKTSVDCNMYICGDSTECANLLLQYGSFCTQLNRALSGIAAEQDRNTREVFAQVKQMYKTPTLKYFGGFNFSQILPDPLKPTKRSFIEDLLFNKVTLADAGFMKQYGECLGDINARDLICAQKFNGLTVLPPLLTDDMIAAYTAALVSGTATAGWTFGAGAALQIPFAMQMAYRFNGIGVTQNVLYENQKQIANQFNKAISQIQESLTTTSTALGKLQDVVNQNAQALNTLVKQLSSNFGAISSVLNDILSRLDPPEAEVQIDRLITGRLQSLQTYVTQQLIRAAEIRASANLAATKMSECVLGQSKRVDFCGKGYHLMSFPQAAPHGVVFLHVTYVPSQERNFTTAPAICHEGKAYFPREGVFVFNGTSWFITQRNFFSPQIITTDNTFVSGNCDVVIGIINNTVYDPLQSELDSIKEELDKIHKNGSGGSGDIIKLLNEQVNKEMQSSNLYMSMSSWCYTHSLDGAGLFLFDHAAEEYEHAKKLIIFLNENNVPVQLTSISAPEHKFEGLTQIFQKAYEHEQHISESINNIVDHAIKSKDHATFNFLQWYVAEQHEEEVLFKDILDKIELIGNENHGLYLADQYVKGIAKSRKSGS

SEQ ID NO: 256 - protein, 1401 aa, Artificial Sequence
  Description of Artificial Sequence: Synthetic polypeptide
AVIGDLKCTSDNINDKDTGPPPISTDTVDVTNGLGTYYVLDRVYLNTTLFLNGYYPTSGSTYRNMALKGSVLLSRLWFKPPFLSDFINGIFAKVKNTKVIKDRVMYSEFPAITIGSTFVNTSYSVVVQPRTINSTQDGDNKLQGLLEVSVCQYNMCEYPQTICHPNLGNHRKELWHLDTGVVSCLYKRNFTYDVNADYLYFHFYQEGGTFYAYFTDTGVVTKFLFNVYLGMALSHYYVMPLTCNSKLTLEYWVTPLTSRQYLLAFNQDGIIFNAVDCMSDFMSEIKCKTQSIAPPTGVYELNGYTVQPIADVYRRKPNLPNCNIEAWLNDKSVPSPLNWERKTFSNCNFNMSSLMSFIQADSFTCNNIDAAKIYGMCFSSITIDKFAIPNGRKVDLQLGNLGYLQSFNYRIDTTATSCQLYYNLPAANVSVSRFNPSTWNKRFGFIEDSVFKPRPAGVLTNHDVVYAQHCFKAPKNFCPCKLNGSCVGSGPGKNNGIGTCPAGTNYLTCDNLCTPDPITFTGTYKCPQTKSLVGIGEHCSGLAVKSDYCGGNSCTCRPQAFLGWSADSCLQGDKCNIFANFILHDVNSGLTCSTDLQKANTDIILGVCVNYDLYGILGQGIFVEVNATYYNSWQNLLYDSNGNLYGFRDYITNRTFMIRSCYSGRVSAAFHANSSEPALLFRNIKCNYVFNNSLTRQLQPINYFDSYLGCVVNAYNSTAISVQTCDLTVGSGYCVDYSKNGGSGGAITTGYRFTNFEPFTVNSVNDSLEPVGGLYEIQIPSEFTIGNMVEFIQTSSPKVTIDCAAFVCGDYAACKSQLVEYGSFCDNINAILTEVNELLDTTQLQVANSLMNGVTLSTKLKDGVNFNVDDINFSPVLGCLGSECSKASSRSAIEDLLFDKVKLSDVGFVEAYNNCTGGAEIRDLICVQSYKGIKVLPPLLSENQFSGYTLAATSASLFPPWTAAAGVPFYLNVQYRINGLGVTMDVLSQNQKLIANAFNNALYAIQEGFDATNSALVKIQAVVNANAEALNNLLQQLSNRFGAISASLQEILSRLDPPEAEAQIDRLINGRLTALNAYVSQQLSDSTLVKFSAAQAMEKVNECVKSQSSRINFCGNGNHIISLVQNAPYGLYFIHFSYVPTKYVTARVSPGLCIAGDRGIAPKSGYFVNVNNTWMYTGSGYYYPEPITENNVVVMSTCAVNYTKAPYVMLNTSISELQDFKEELDQWHKNGSGGSGDIIKLLNEQVNKEMQSSNLYMSMSSWCYTHSLDGAGLFLFDHAAEEYEHAKKLIIFLNENNVPVQLTSISAPEHKFEGLTQIFQKAYEHEQHISESINNIVDHAIKSKDHATFNFLQWYVAEQHEEEVLFKDILDKIELIGNENHGLYLADQYVKGIAKSRKSGS

SEQ ID NO: 257 - protein, 1401 aa, Artificial Sequence
  Description of Artificial Sequence: Synthetic polypeptide
AVIGDLKCTSDNINDKDTGPPPISTDTVDVTNGLGTYYVLDRVYLNTTLFLNGYYPTSGSTYRNMALKGSVLLSRLWFKPPFLSDFINGIFAKVKNTKVIKDRVMYSEFPAITIGSTFVNTSYSVVVQPRTINSTQDGDNKLQGLLEVSVCQYNMCEYPQTICHPNLGNHRKELWHLDTGVVSCLYKRNFTYDVNADYLYFHFYQEGGTFYAYFTDTGVVTKFLFNVYLGMALSHYYVMPLTCNSKLTLEYWVTPLTSRQYLLAFNQDGIIFNAVDCMSDFMSEIKCKTQSIAPPTGVYELNGYTVQPIADVYRRKPNLPNCNIEAWLNDKSVPSPLNWERKTFSNCNFNMSSLMSFIQADSFTCNNIDAAKIYGMCFSSITIDKFAIPNGRKVDLQLGNLGYLQSFNYRIDTTATSCQLYYNLPAANVSVSRFNPSTWNKRFGFIEDSVFKPRPAGVLTNHDVVYAQHCFKAPKNFCPCKLNGSCVGSGPGKNNGIGTCPAGTNYLTCDNLCTPDPITFTGTYKCPQTKSLVGIGEHCSGLAVKSDYCGGNSCTCRPQAFLGWSADSCLQGDKCNIFANFILHDVNSGLTCSTDLQKANTDIILGVCVNYDLYGILGQGIFVEVNATYYNSWQNLLYDSNGNLYGFRDYITNRTFMIRSCYSGRVSAAFHANSSEPALLFRNIKCNYVFNNSLTRQLQPINYFDSYLGCVVNAYNSTAISVQTCDLTVGSGYCVDYSKNGGSGGAITTGYRFTNFEPFTVNSVNDSLEPVGGLYEIQIPSEFTIGNMVEFIQTSSPKVTIDCAAFVCGDYAACKSQLVEYGSFCDNINAILTEVNELLDTTQLQVANSLMNGVTLSTKLKDGVNFNVDDINFSPVLGCLGSECSKASSRSAIEDLLFDKVKLSDVGFVEAYNNCTGGAEIRDLICVQSYKGIKVLPPLLSENQFSGYTLAATSASLFPPWTAAAGVPFYLNVQYRINGLGVTMDVLSQNQKLIANAFNNALYAIQEGFDATNSALVKIQAVVNANAEALNNLLQQLSNRFGAISASLQEILSRLDPPEAEAQIDRLINGRLTALNAYVSQQLSDSTLVKFSAAQAMEKVNECVKSQSSRINFCGNGNHIISLVQNAPYGLYFIHFSYVPTKYVTARVSPGLCIAGDRGIAPKSGYFVNVNNTWMYTGSGYYYPEPITENNVVVMSTCAVNYTKAPYVMLNTSISELQDFKEELDQWHKQGSGGSGDIIKLLNEQVNKEMQSSNLYMSMSSWCYTHSLDGAGLFLFDHAAEEYEHAKKLIIFLNENNVPVQLTSISAPEHKFEGLTQIFQKAYEHEQHISESINNIVDHAIKSKDHATFNFLQWYVAEQHEEEVLFKDILDKIELIGNENHGLYLADQYVKGIAKSRKSGS

SEQ ID NO: 258 - protein, 1401 aa, Artificial Sequence
  Description of Artificial Sequence: Synthetic polypeptide
AVIGDLKCTSDNINDKDTGPPPISTDTVDVTNGLGTYYVLDRVYLNTTLFLNGYYPTSGSTYRNMALKGSVLLSRLWFKPPFLSDFINGIFAKVKNTKVIKDRVMYSEFPAITIGSTFVNTSYSVVVQPRTINSTQDGDNKLQGLLEVSVCQYNMCEYPQTICHPNLGNHRKELWHLDTGVVSCLYKRNFTYDVNADYLYFHFYQEGGTFYAYFTDTGVVTKFLFNVYLGMALSHYYVMPLTCNSKLTLEYWVTPLTSRQYLLAFNQDGIIFNAVDCMSDFMSEIKCKTQSIAPPTGVYELNGYTVQPIADVYRRKPNLPNCNIEAWLNDKSVPSPLNWERKTFSNCNFNMSSLMSFIQADSFTCNNIDAAKIYGMCFSSITIDKFAIPNGRKVDLQLGNLGYLQSFNYRIDTTATSCQLYYNLPAANVSVSRFNPSTWNKRFGFIEDSVFKPRPAGVLTNHDVVYAQHCFKAPKNFCPCKLNGSCVGSGPGKNNGIGTCPAGTNYLTCDNLCTPDPITFTGTYKCPQTKSLVGIGEHCSGLAVKSDYCGGNSCTCRPQAFLGWSADSCLQGDKCNIFANFILHDVNSGLTCSTDLQKANTDIILGVCVNYDLYGILGQGIFVEVNATYYNSWQNLLYDSNGNLYGFRDYITNRTFMIRSCYSGRVSAAFHANSSEPALLFRNIKCNYVFNNSLTRQLQPINYFDSYLGCVVNAYNSTAISVQTCDLTVGSGYCVDYSKNGGSGGAITTGYRFTNFEPFTVNSVNDSLEPVGGLYEIQIPSEFTIGNMVEFIQTSSPKVTIDCAAFVCGDYAACKSQLVEYGSFCDNINAILTEVNELLDTTQLQVANSLMNGVTLSTKLKDGVNFNVDDINFSPVLGCLGSECSKASSRSAIEDLLFDKVKLSDVGFVEAYNNCTGGAEIRDLICVQSYKGIKVLPPLLSENQFSGYTLAATSASLFPPWTAAAGVPFYLNVQYRINGLGVTMDVLSQNQKLIANAFNNALYAIQEGFDATNSALVKIQAVVNANAEALNNLLQQLSNRFGAISASLQEILSRLDPPEAEAQIDRLINGRLTALNAYVSQQLSDSTLVKFSAAQAMEKVNECVKSQSSRINFCGNGNHIISLVQNAPYGLYFIHFSYVPTKYVTARVSPGLCIAGDRGIAPKSGYFVNVNNTWMYTGSGYYYPEPITENNVVVMSTCAVNYTKAPYVMLNTLQSNLQDIKEELDQIHKNGSGGSGDIIKLLNEQVNKEMQSSNLYMSMSSWCYTHSLDGAGLFLFDHAAEEYEHAKKLIIFLNENNVPVQLTSISAPEHKFEGLTQIFQKAYEHEQHISESINNIVDHAIKSKDHATFNFLQWYVAEQHEEEVLFKDILDKIELIGNENHGLYLADQYVKGIAKSRKSGS

SEQ ID NO: 259 - protein, 1401 aa, Artificial Sequence
  Description of Artificial Sequence: Synthetic polypeptide
AVIGDLKCTSDNINDKDTGPPPISTDTVDVTNGLGTYYVLDRVYLNTTLFLNGYYPTSGSTYRNMALKGSVLLSRLWFKPPFLSDFINGIFAKVKNTKVIKDRVMYSEFPAITIGSTFVNTSYSVVVQPRTINSTQDGDNKLQGLLEVSVCQYNMCEYPQTICHPNLGNHRKELWHLDTGVVSCLYKRNFTYDVNADYLYFHFYQEGGTFYAYFTDTGVVTKFLFNVYLGMALSHYYVMPLTCNSKLTLEYWVTPLTSRQYLLAFNQDGIIFNAVDCMSDFMSEIKCKTQSIAPPTGVYELNGYTVQPIADVYRRKPNLPNCNIEAWLNDKSVPSPLNWERKTFSNCNFNMSSLMSFIQADSFTCNNIDAAKIYGMCFSSITIDKFAIPNGRKVDLQLGNLGYLQSFNYRIDTTATSCQLYYNLPAANVSVSRFNPSTWNKRFGFIEDSVFKPRPAGVLTNHDVVYAQHCFKAPKNFCPCKLNGSCVGSGPGKNNGIGTCPAGTNYLTCDNLCTPDPITFTGTYKCPQTKSLVGIGEHCSGLAVKSDYCGGNSCTCRPQAFLGWSADSCLQGDKCNIFANFILHDVNSGLTCSTDLQKANTDIILGVCVNYDLYGILGQGIFVEVNATYYNSWQNLLYDSNGNLYGFRDYITNRTFMIRSCYSGRVSAAFHANSSEPALLFRNIKCNYVFNNSLTRQLQPINYFDSYLGCVVNAYNSTAISVQTCDLTVGSGYCVDYSKNGGSGGAITTGYRFTNFEPFTVNSVNDSLEPVGGLYEIQIPSEFTIGNMVEFIQTSSPKVTIDCAAFVCGDYAACKSQLVEYGSFCDNINAILTEVNELLDTTQLQVANSLMNGVTLSTKLKDGVNFNVDDINFSPVLGCLGSECSKASSRSAIEDLLFDKVKLSDVGFVEAYNNCTGGAEIRDLICVQSYKGIKVLPPLLSENQFSGYTLAATSASLFPPWTAAAGVPFYLNVQYRINGLGVTMDVLSQNQKLIANAFNNALYAIQEGFDATNSALVKIQAVVNANAEALNNLLQQLSNRFGAISASLQEILSRLDPPEAEAQIDRLINGRLTALNAYVSQQLSDSTLVKFSAAQAMEKVNECVKSQSSRINFCGNGNHIISLVQNAPYGLYFIHFSYVPTKYVTARVSPGLCIAGDRGIAPKSGYFVNVNNTWMYTGSGYYYPEPITENNVVVMSTCAVNYTKAPYVMLNTLQSNLQDIKEELDQIHKQGSGGSGDIIKLLNEQVNKEMQSSNLYMSMSSWCYTHSLDGAGLFLFDHAAEEYEHAKKLIIFLNENNVPVQLTSISAPEHKFEGLTQIFQKAYEHEQHISESINNIVDHAIKSKDHATFNFLQWYVAEQHEEEVLFKDILDKIELIGNENHGLYLADQYVKGIAKSRKSGS

SEQ ID NO: 260 - protein, 1401 aa, Artificial Sequence
  Description of Artificial Sequence: Synthetic polypeptide
AVIGDLKCTSDNINDKDTGPPPISTDTVDVTNGLGTYYVLDRVYLNTTLFLNGYYPTSGSTYRNMALKGSVLLSRLWFKPPFLSDFINGIFAKVKNTKVIKDRVMYSEFPAITIGSTFVNTSYSVVVQPRTINSTQDGDNKLQGLLEVSVCQYNMCEYPQTICHPNLGNHRKELWHLDTGVVSCLYKRNFTYDVNADYLYFHFYQEGGTFYAYFTDTGVVTKFLFNVYLGMALSHYYVMPLTCNSKLTLEYWVTPLTSRQYLLAFNQDGIIFNAVDCMSDFMSEIKCKTQSIAPPTGVYELNGYTVQPIADVYRRKPNLPNCNIEAWLNDKSVPSPLNWERKTFSNCNFNMSSLMSFIQADSFTCNNIDAAKIYGMCFSSITIDKFAIPNGRKVDLQLGNLGYLQSFNYRIDTTATSCQLYYNLPAANVSVSRFNPSTWNKRFGFIEDSVFKPRPAGVLTNHDVVYAQHCFKAPKNFCPCKLNGSCVGSGPGKNNGIGTCPAGTNYLTCDNLCTPDPITFTGTYKCPQTKSLVGIGEHCSGLAVKSDYCGGNSCTCRPQAFLGWSADSCLQGDKCNIFANFILHDVNSGLTCSTDLQKANTDIILGVCVNYDLYGILGQGIFVEVNATYYNSWQNLLYDSNGNLYGFRDYITNRTFMIRSCYSGRVSAAFHANSSEPALLFRNIKCNYVFNNSLTRQLQPINYFDSYLGCVVNAYNSTAISVQTCDLTVGSGYCVDYSKNGGSGGAITTGYRFTNFEPFTVNSVNDSLEPVGGLYEIQIPSEFTIGNMVEFIQTSSPKVTIDCAAFVCGDYAACKSQLVEYGSFCDNINAILTEVNELLDTTQLQVANSLMNGVTLSTKLKDGVNFNVDDINFSPVLGCLGSECSKASSRSAIEDLLFDKVKLSDVGFVEAYNNCTGGAEIRDLICVQSYKGIKVLPPLLSENQFSGYTLAATSASLFPPWTAAAGVPFYLNVQYRINGLGVTMDVLSQNQKLIANAFNNALYAIQEGFDATNSALVKIQAVVNANAEALNNLLQQLSNRFGAISASLQEILSRLDPPEAEAQIDRLINGRLTALNAYVSQQLSDSTLVKFSAAQAMEKVNECVKSQSSRINFCGNGNHIISLVQNAPYGLYFIHFSYVPTKYVTARVSPGLCIAGDRGIAPKSGYFVNVNNTWMYTGSGYYYPEPITENNVVVMSTCAVNYTKAPYVMLNTLQSNLQDLKEELDQLHKNGSGGSGDIIKLLNEQVNKEMQSSNLYMSMSSWCYTHSLDGAGLFLFDHAAEEYEHAKKLIIFLNENNVPVQLTSISAPEHKFEGLTQIFQKAYEHEQHISESINNIVDHAIKSKDHATFNFLQWYVAEQHEEEVLFKDILDKIELIGNENHGLYLADQYVKGIAKSRKSGS

SEQ ID NO: 261 - protein, 1401 aa, Artificial Sequence
  Description of Artificial Sequence: Synthetic polypeptide
AVIGDLKCTSDNINDKDTGPPPISTDTVDVTNGLGTYYVLDRVYLNTTLFLNGYYPTSGSTYRNMALKGSVLLSRLWFKPPFLSDFINGIFAKVKNTKVIKDRVMYSEFPAITIGSTFVNTSYSVVVQPRTINSTQDGDNKLQGLLEVSVCQYNMCEYPQTICHPNLGNHRKELWHLDTGVVSCLYKRNFTYDVNADYLYFHFYQEGGTFYAYFTDTGVVTKFLFNVYLGMALSHYYVMPLTCNSKLTLEYWVTPLTSRQYLLAFNQDGIIFNAVDCMSDFMSEIKCKTQSIAPPTGVYELNGYTVQPIADVYRRKPNLPNCNIEAWLNDKSVPSPLNWERKTFSNCNFNMSSLMSFIQADSFTCNNIDAAKIYGMCFSSITIDKFAIPNGRKVDLQLGNLGYLQSFNYRIDTTATSCQLYYNLPAANVSVSRFNPSTWNKRFGFIEDSVFKPRPAGVLTNHDVVYAQHCFKAPKNFCPCKLNGSCVGSGPGKNNGIGTCPAGTNYLTCDNLCTPDPITFTGTYKCPQTKSLVGIGEHCSGLAVKSDYCGGNSCTCRPQAFLGWSADSCLQGDKCNIFANFILHDVNSGLTCSTDLQKANTDIILGVCVNYDLYGILGQGIFVEVNATYYNSWQNLLYDSNGNLYGFRDYITNRTFMIRSCYSGRVSAAFHANSSEPALLFRNIKCNYVFNNSLTRQLQPINYFDSYLGCVVNAYNSTAISVQTCDLTVGSGYCVDYSKNGGSGGAITTGYRFTNFEPFTVNSVNDSLEPVGGLYEIQIPSEFTIGNMVEFIQTSSPKVTIDCAAFVCGDYAACKSQLVEYGSFCDNINAILTEVNELLDTTQLQVANSLMNGVTLSTKLKDGVNFNVDDINFSPVLGCLGSECSKASSRSAIEDLLFDKVKLSDVGFVEAYNNCTGGAEIRDLICVQSYKGIKVLPPLLSENQFSGYTLAATSASLFPPWTAAAGVPFYLNVQYRINGLGVTMDVLSQNQKLIANAFNNALYAIQEGFDATNSALVKIQAVVNANAEALNNLLQQLSNRFGAISASLQEILSRLDPPEAEAQIDRLINGRLTALNAYVSQQLSDSTLVKFSAAQAMEKVNECVKSQSSRINFCGNGNHIISLVQNAPYGLYFIHFSYVPTKYVTARVSPGLCIAGDRGIAPKSGYFVNVNNTWMYTGSGYYYPEPITENNVVVMSTCAVNYTKAPYVMLNTLQSNLQDLKEELDQLHKQGSGGSGDIIKLLNEQVNKEMQSSNLYMSMSSWCYTHSLDGAGLFLFDHAAEEYEHAKKLIIFLNENNVPVQLTSISAPEHKFEGLTQIFQKAYEHEQHISESINNIVDHAIKSKDHATFNFLQWYVAEQHEEEVLFKDILDKIELIGNENHGLYLADQYVKGIAKSRKSGS

SEQ ID NO: 262 - protein, 1401 aa, Artificial Sequence
  Description of Artificial Sequence: Synthetic polypeptide
AVIGDLKCTSDNINDKDTGPPPISTDTVDVTNGLGTYYVLDRVYLNTTLFLNGYYPTSGSTYRNMALKGSVLLSRLWFKPPFLSDFINGIFAKVKNTKVIKDRVMYSEFPAITIGSTFVNTSYSVVVQPRTINSTQDGDNKLQGLLEVSVCQYNMCEYPQTICHPNLGNHRKELWHLDTGVVSCLYKRNFTYDVNADYLYFHFYQEGGTFYAYFTDTGVVTKFLFNVYLGMALSHYYVMPLTCNSKLTLEYWVTPLTSRQYLLAFNQDGIIFNAVDCMSDFMSEIKCKTQSIAPPTGVYELNGYTVQPIADVYRRKPNLPNCNIEAWLNDKSVPSPLNWERKTFSNCNFNMSSLMSFIQADSFTCNNIDAAKIYGMCFSSITIDKFAIPNGRKVDLQLGNLGYLQSFNYRIDTTATSCQLYYNLPAANVSVSRFNPSTWNKRFGFIEDSVFKPRPAGVLTNHDVVYAQHCFKAPKNFCPCKLNGSCVGSGPGKNNGIGTCPAGTNYLTCDNLCTPDPITFTGTYKCPQTKSLVGIGEHCSGLAVKSDYCGGNSCTCRPQAFLGWSADSCLQGDKCNIFANFILHDVNSGLTCSTDLQKANTDIILGVCVNYDLYGILGQGIFVEVNATYYNSWQNLLYDSNGNLYGFRDYITNRTFMIRSCYSGRVSAAFHANSSEPALLFRNIKCNYVFNNSLTRQLQPINYFDSYLGCVVNAYNSTAISVQTCDLTVGSGYCVDYSKNGGSGGAITTGYRFTNFEPFTVNSVNDSLEPVGGLYEIQIPSEFTIGNMVEFIQTSSPKVTIDCAAFVCGDYAACKSQLVEYGSFCDNINAILTEVNELLDTTQLQVANSLMNGVTLSTKLKDGVNFNVDDINFSPVLGCLGSECSKASSRSAIEDLLFDKVKLSDVGFVEAYNNCTGGAEIRDLICVQSYKGIKVLPPLLSENQFSGYTLAATSASLFPPWTAAAGVPFYLNVQYRINGLGVTMDVLSQNQKLIANAFNNALYAIQEGFDATNSALVKIQAVVNANAEALNNLLQQLSNRFGAISASLQEILSRLDPPEAEAQIDRLINGRLTALNAYVSQQLSDSTLVKFSAAQAMEKVNECVKSQSSRINFCGNGNHIISLVQNAPYGLYFIHFSYVPTKYVTARVSPGLCIAGDRGIAPKSGYFVNVNNTWMYTGSGYYYPEPITENNVVVMSTCAVNYTKAPYVMLNTSISELQDIKEELDQIHKQGSGGSGDIIKLLNEQVNKEMQSSNLYMSMSSWCYTHSLDGAGLFLFDHAAEEYEHAKKLIIFLNENNVPVQLTSISAPEHKFEGLTQIFQKAYEHEQHISESINNIVDHAIKSKDHATFNFLQWYVAEQHEEEVLFKDILDKIELIGNENHGLYLADQYVKGIAKSRKSGS

SEQ ID NO: 263 - protein, 1401 aa, Artificial Sequence
  Description of Artificial Sequence: Synthetic polypeptide
AVIGDLKCTSDNINDKDTGPPPISTDTVDVTNGLGTYYVLDRVYLNTTLFLNGYYPTSGSTYRNMALKGSVLLSRLWFKPPFLSDFINGIFAKVKNTKVIKDRVMYSEFPAITIGSTFVNTSYSVVVQPRTINSTQDGDNKLQGLLEVSVCQYNMCEYPQTICHPNLGNHRKELWHLDTGVVSCLYKRNFTYDVNADYLYFHFYQEGGTFYAYFTDTGVVTKFLFNVYLGMALSHYYVMPLTCNSKLTLEYWVTPLTSRQYLLAFNQDGIIFNAVDCMSDFMSEIKCKTQSIAPPTGVYELNGYTVQPIADVYRRKPNLPNCNIEAWLNDKSVPSPLNWERKTFSNCNFNMSSLMSFIQADSFTCNNIDAAKIYGMCFSSITIDKFAIPNGRKVDLQLGNLGYLQSFNYRIDTTATSCQLYYNLPAANVSVSRFNPSTWNKRFGFIEDSVFKPRPAGVLTNHDVVYAQHCFKAPKNFCPCKLNGSCVGSGPGKNNGIGTCPAGTNYLTCDNLCTPDPITFTGTYKCPQTKSLVGIGEHCSGLAVKSDYCGGNSCTCRPQAFLGWSADSCLQGDKCNIFANFILHDVNSGLTCSTDLQKANTDIILGVCVNYDLYGILGQGIFVEVNATYYNSWQNLLYDSNGNLYGFRDYITNRTFMIRSCYSGRVSAAFHANSSEPALLFRNIKCNYVFNNSLTRQLQPINYFDSYLGCVVNAYNSTAISVQTCDLTVGSGYCVDYSKNGGSGGAITTGYRFTNFEPFTVNSVNDSLEPVGGLYEIQIPSEFTIGNMVEFIQTSSPKVTIDCAAFVCGDYAACKSQLVEYGSFCDNINAILTEVNELLDTTQLQVANSLMNGVTLSTKLKDGVNFNVDDINFSPVLGCLGSECSKASSRSAIEDLLFDKVKLSDVGFVEAYNNCTGGAEIRDLICVQSYKGIKVLPPLLSENQFSGYTLAATSASLFPPWTAAAGVPFYLNVQYRINGLGVTMDVLSQNQKLIANAFNNALYAIQEGFDATNSALVKIQAVVNANAEALNNLLQQLSNRFGAISASLQEILSRLDPPEAEAQIDRLINGRLTALNAYVSQQLSDSTLVKFSAAQAMEKVNECVKSQSSRINFCGNGNHIISLVQNAPYGLYFIHFSYVPTKYVTARVSPGLCIAGDRGIAPKSGYFVNVNNTWMYTGSGYYYPEPITENNVVVMSTCAVNYTKAPYVMLNTSISELQDLKEELDQLHKQGSGGSGDIIKLLNEQVNKEMQSSNLYMSMSSWCYTHSLDGAGLFLFDHAAEEYEHAKKLIIFLNENNVPVQLTSISAPEHKFEGLTQIFQKAYEHEQHISESINNIVDHAIKSKDHATFNFLQWYVAEQHEEEVLFKDILDKIELIGNENHGLYLADQYVKGIAKSRKSGS

SEQ ID NO: 264 - protein, 1209 aa, Artificial Sequence
  Description of Artificial Sequence: Synthetic polypeptide
CQTTNGLNTSYSVCNGCVGYSENVFAVESGGYIPSDFAFNNWFLLTNTSSVVDGVVRSFQPLLLNCLWSVSGLRFTTGFVYFNGTGRGDCKGFSSDVLSDVIRYNLNFEENLRRGTILFKTSYGVVVFYCTNNTLVSGDAHIPFGTVLGNFYCFVNTTIGNETTSAFVGALPKTVREFVISRTGHFYINGYRYFTLGNVEAVNFNVTTAETTDFCTVALASYADVLVNVSQTSIANIIYCNSVINRLRCDQLSFDVPDGFYSTSPIQSVELPVSIVSLPVYHKHTFIVLYVDFKPQSGGGKCFNCYPAGVNITLANFNETKGPLCVDTSHFTTKYVAVYANVGRWSASINTGNCPFSFGKVNNFVKFGSVCFSLKDIPGGCAMPIVANWAYSKYYTIGSLYVSWSDGDGITGVPQPVEGVSSFMNVTLDKCTKYNIYDVSGVGVIRVSNDTFLNGITYTSTSGNLLGFKDVTKGTIYSITPCNPPDQLVVYQQAVVGAMLSENFTSYGFSNVVELPKFFYASNGTYNCTDAVLTYSSFGVCADGSIIAVQPRNVSYDSVSAIVTANLSIPSNWTTSVQVEYLQITSTPIVVDCSTYVCNGNVRCVELLKQYTSACKTIEDALRNSAMLESADVSEMLTFDKKAFTLANVSSFGDYNLSSVIPSLPRSGSRVAGRSAIEDILFSKLVTSGLGTVDADYKKCTKGLSIADLACAQYYNGIMVLPGVADAERMAMYTGSLIGGIALGGLTSAASIPFSLAIQSRLNYVALQTDVLQENQKILAASFNKAMTNIVDAFTGVNDAITQTSQALQTVATALNKIQDVVNQQGNSLNHLTSQLRQNFQAISSSIQAIYDRLDPPQADQQVDRLITGRLAALNVFVSHTLTKYTEVRASRQLAQQKVNECVKSQSKRYGFCGNGTHIFSLVNAAPEGLVFLHTVLLPTQYKDVEAWSGLCVDGRNGYVLRQPNLALYKEGNYYRITSRIMFEPRIPTIADFVQIENCNVTFVNISRSELQTIVPEYIDLNKTLQELSYKLPNLTVKGSGGSGDIIKLLNEQVNKEMQSSNLYMSMSSWCYTHSLDGAGLFLFDHAAEEYEHAKKLIIFLNENNVPVQLTSISAPEHKFEGLTQIFQKAYEHEQHISESINNIVDHAIKSKDHATFNFLQWYVAEQHEEEVLFKDILDKIELIGNENHGLYLADQYVKGIAKSRKSGS

SEQ ID NO: 265 - protein, 1210 aa, Artificial Sequence
  Description of Artificial Sequence: Synthetic polypeptide
CQTTNGLNTSYSVCNGCVGYSENVFAVESGGYIPSDFAFNNWFLLTNTSSVVDGVVRSFQPLLLNCLWSVSGLRFTTGFVYFNGTGRGDCKGFSSDVLSDVIRYNLNFEENLRRGTILFKTSYGVVVFYCTNNTLVSGDAHIPFGTVLGNFYCFVNTTIGNETTSAFVGALPKTVREFVISRTGHFYINGYRYFTLGNVEAVNFNVTTAETTDFCTVALASYADVLVNVSQTSIANIIYCNSVINRLRCDQLSFDVPDGFYSTSPIQSVELPVSIVSLPVYHKHTFIVLYVDFKPQSGGGKCFNCYPAGVNITLANFNETKGPLCVDTSHFTTKYVAVYANVGRWSASINTGNCPFSFGKVNNFVKFGSVCFSLKDIPGGCAMPIVANWAYSKYYTIGSLYVSWSDGDGITGVPQPVEGVSSFMNVTLDKCTKYNIYDVSGVGVIRVSNDTFLNGITYTSTSGNLLGFKDVTKGTIYSITPCNPPDQLVVYQQAVVGAMLSENFTSYGFSNVVELPKFFYASNGTYNCTDAVLTYSSFGVCADGSIIAVQPRNVSYDSVSAIVTANLSIPSNWTTSVQVEYLQITSTPIVVDCSTYVCNGNVRCVELLKQYTSACKTIEDALRNSAMLESADVSEMLTFDKKAFTLANVSSFGDYNLSSVIPSLPRSGSRVAGRSAIEDILFSKLVTSGLGTVDADYKKCTKGLSIADLACAQYYNGIMVLPGVADAERMAMYTGSLIGGIALGGLTSAASIPFSLAIQSRLNYVALQTDVLQENQKILAASFNKAMTNIVDAFTGVNDAITQTSQALQTVATALNKIQDVVNQQGNSLNHLTSQLRQNFQAISSSIQAIYDRLDPPQADQQVDRLITGRLAALNVFVSHTLTKYTEVRASRQLAQQKVNECVKSQSKRYGFCGNGTHIFSLVNAAPEGLVFLHTVLLPTQYKDVEAWSGLCVDGRNGYVLRQPNLALYKEGNYYRITSRIMFEPRIPTIADFVQIENCNVTFVNISRSELQTIVPEYIGDLNKTLQELSYKLPNLTVKGSGGSGDIIKLLNEQVNKEMQSSNLYMSMSSWCYTHSLDGAGLFLFDHAAEEYEHAKKLIIFLNENNVPVQLTSISAPEHKFEGLTQIFQKAYEHEQHISESINNIVDHAIKSKDHATFNFLQWYVAEQHEEEVLFKDILDKIELIGNENHGLYLADQYVKGIAKSRKSGS

SEQ ID NO: 266 - protein, 1387 aa, Artificial Sequence
  Description of Artificial Sequence: Synthetic polypeptide
CNSNANLSMLQLGVPDNSSTIVTGLLPTHWFCANQSTSVYSANGFFYIDVGNHRSAFALHTGYYDANQYYIYVTNEIGLNASVTLKICKFSRNTTFDFLSNASSSFDCIVNLLFTEQLGAPLGITISGETVRLHLYNVTRTFYVPAAYKLTKLSVKCYFNYSCVFSVVNATVTVNVTTHNGRVVNYTVCDDCNGYTDNIFSVQQDGRIPNGFPFNNWFLLTNGSTLVDGVSRLYQPLRLTCLWPVPGLKSSTGFVYFNATGSDVNCNGYQHNSVVDVMRYNLNFSANSLDNLKSGVIVFKTLQYDVLFYCSNSSSGVLDTTIPFGPSSQPYYCFINSTINTTHVSTFVGILPPTVREIVVARTGQFYINGFKYFDLGFIEAVNFNVTTASATDFWTVAFATFVDVLVNVSATNIQNLLYCDSPFEKLQCEHLQFGLQDGFYSANFLDDNVLPETYVALPIYYQHTDINFTATASFGGSCYVCKPHQVNISLNGNTSVCVRTSHFSIRYIYNRVKSGSPGDSSWHIYLKSGTCPFSFSKLNNFQKFKTICFSTVEVPGSCNFPLEATWHYTSYTIVGALYVTWSEGNSITGVPYPVSGIREFSNLVLNNCTKYNIYDYVGTGIIRSSNQSLAGGITYVSNSGNLLGFKNVSTGNIFIVTPCNQPDQVAVYQQSIIGAMTAVNESRYGLQNLLQLPNFYYVSNGGNNCTTAVMTYSNFGICADGSLIPVRPRNSSDNGISAIITANLSIPSNWTTSVQVEYLQITSTPIVVDCATYVCNGNPRCKNLLKQYTSACKTIEDALRLSAHLETNDVSSMLTFDSNAFSLANVTSFGDYNLSSVLPQRNIRSSRIAGRSALEDLLFSKVVTSGLGTVDVDYKSCTKGLSIADLACAQYYNGIMVLPGVADAERMAMYTGSLIGGMVLGGLTSAAAIPFSLALQARLNYVALQTDVLQENQKILAASFNKAINNIVASFSSVNDAITQTAEAIHTVTIALNKIQDVVNQQGSALNHLTSQLRHNFQAISNSIQAIYDRLDPPQADQQVDRLITGRLAALNAFVSQVLNKYTEVRGSRRLAQQKINECVKSQSNRYGFCGNGTHIFSIVNSAPDGLLFLHTVLLPTDYKNVKAWSGICVDGIYGYVLRQPNLVLYSDNGVFRVTSRVMFQPRLPVLSDFVQIYNCNVTFVNISRVELHTVIPDYVDLNKTLQELAQNLEKLVKKGSGGSGDIIKLLNEQVNKEMQSSNLYMSMSSWCYTHSLDGAGLFLFDHAAEEYEHAKKLIIFLNENNVPVQLTSISAPEHKFEGLTQIFQKAYEHEQHISESINNIVDHAIKSKDHATFNFLQWYVAEQHEEEVLFKDILDKIELIGNENHGLYLADQYVKGIAKSRKSGS

SEQ ID NO: 267 - protein, 1388 aa, Artificial Sequence
  Description of Artificial Sequence: Synthetic polypeptide
CNSNANLSMLQLGVPDNSSTIVTGLLPTHWFCANQSTSVYSANGFFYIDVGNHRSAFALHTGYYDANQYYIYVTNEIGLNASVTLKICKFSRNTTFDFLSNASSSFDCIVNLLFTEQLGAPLGITISGETVRLHLYNVTRTFYVPAAYKLTKLSVKCYFNYSCVFSVVNATVTVNVTTHNGRVVNYTVCDDCNGYTDNIFSVQQDGRIPNGFPFNNWFLLTNGSTLVDGVSRLYQPLRLTCLWPVPGLKSSTGFVYFNATGSDVNCNGYQHNSVVDVMRYNLNFSANSLDNLKSGVIVFKTLQYDVLFYCSNSSSGVLDTTIPFGPSSQPYYCFINSTINTTHVSTFVGILPPTVREIVVARTGQFYINGFKYFDLGFIEAVNFNVTTASATDFWTVAFATFVDVLVNVSATNIQNLLYCDSPFEKLQCEHLQFGLQDGFYSANFLDDNVLPETYVALPIYYQHTDINFTATASFGGSCYVCKPHQVNISLNGNTSVCVRTSHFSIRYIYNRVKSGSPGDSSWHIYLKSGTCPFSFSKLNNFQKFKTICFSTVEVPGSCNFPLEATWHYTSYTIVGALYVTWSEGNSITGVPYPVSGIREFSNLVLNNCTKYNIYDYVGTGIIRSSNQSLAGGITYVSNSGNLLGFKNVSTGNIFIVTPCNQPDQVAVYQQSIIGAMTAVNESRYGLQNLLQLPNFYYVSNGGNNCTTAVMTYSNFGICADGSLIPVRPRNSSDNGISAIITANLSIPSNWTTSVQVEYLQITSTPIVVDCATYVCNGNPRCKNLLKQYTSACKTIEDALRLSAHLETNDVSSMLTFDSNAFSLANVTSFGDYNLSSVLPQRNIRSSRIAGRSALEDLLFSKVVTSGLGTVDVDYKSCTKGLSIADLACAQYYNGIMVLPGVADAERMAMYTGSLIGGMVLGGLTSAAAIPFSLALQARLNYVALQTDVLQENQKILAASFNKAINNIVASFSSVNDAITQTAEAIHTVTIALNKIQDVVNQQGSALNHLTSQLRHNFQAISNSIQAIYDRLDPPQADQQVDRLITGRLAALNAFVSQVLNKYTEVRGSRRLAQQKINECVKSQSNRYGFCGNGTHIFSIVNSAPDGLLFLHTVLLPTDYKNVKAWSGICVDGIYGYVLRQPNLVLYSDNGVFRVTSRVMFQPRLPVLSDFVQIYNCNVTFVNISRVELHTVIPDYIGDLNKTLQELAQNLEKLVKKGSGGSGDIIKLLNEQVNKEMQSSNLYMSMSSWCYTHSLDGAGLFLFDHAAEEYEHAKKLIIFLNENNVPVQLTSISAPEHKFEGLTQIFQKAYEHEQHISESINNIVDHAIKSKDHATFNFLQWYVAEQHEEEVLFKDILDKIELIGNENHGLYLADQYVKGIAKSRKSGS

SEQ ID NO: 268 - protein, 1398 aa, Artificial Sequence
  Description of Artificial Sequence: Synthetic polypeptide
VIGDFNCTNSFINDYNKTIPRISEDVVDVSLGLGTYYVLNRVYLNTTLLFTGYFPKSGANFRDLALKGSIYLSTLWYKPPFLSDFNNGIFSKVKNTKLYVNNTLYSEFSTIVIGSVFVNTSYTIVVQPHNGILEITACQYTMCEYPHTVCKSKGSIRNESWHIDSSEPLCLFKKNFTYNVSADWLYFHFYQERGVFYAYYADVGMPTTFLFSLYLGTILSHYYVMPLTCNAISSNTDNETLEYWVTPLSRRQYLLNFDEHGVITNAVDCSSSFLSEIQCKTQSFAPNTGVYDLSGFTVKPVATVYRRIPNLPDCDIDNWLNNVSVPSPLNWERRIFSNCNFNLSTLLRLVHVDSFSCNNLDKSKIFGSCFNSITVDKFAIPNRRRDDLQLGSSGFLQSSNYKIDISSSSCQLYYSLPLVNVTINNFNPSSWNRRYGFGSFNLSSYDVVYSDHCFSVNSDFCPCADPSVVNSCAKSKPPSAICPAGTKYRHCDLDTTLYVKNWCRCSCLPDPISTYSPNTCPQKKVVVGIGEHCPGLGINEEKCGTQLNHSSCFCSPDAFLGWSFDSCISNNRCNIFSNFIFNGINSGTTCSNDLLYSNTEISTGVCVNYDLYGITGQGIFKEVSAAYYNNWQNLLYDSNGNIIGFKDFLTNKTYTILPCYSGRVSAAFYQNSSSPALLYRNLKCSYVLNNISFISQPFYFDSYLGCVLNAVNLTSYSVSSCDLRMGSGFCIDYALPSSGGSGSGISSPYRFVTFEPFNVSFVNDSVETVGGLFEIQIPTNFTIAGHEEFIQTSSPKVTIDCSAFVCSNYAACHDLLSEYGTFCDNINSILNEVNDLLDITQLQVANALMQGVTLSSNLNTNLHSDVDNIDFKSLLGCLGSQCGSSSRSLLEDLLFNKVKLSDVGFVEAYNNCTGGSEIRDLLCVQSFNGIKVLPPILSETQISGYTTAATVAAMFPPWSAAAGVPFSLNVQYRINGLGVTMDVLNKNQKLIANAFNKALLSIQNGFTATNSALAKIQSVVNANAQALNSLLQQLFNKFGAISSSLQEILSRLDPPEAQVQIDRLINGRLTALNAYVSQQLSDITLIKAGASRAIEKVNECVKSQSPRINFCGNGNHILSLVQNAPYGLLFIHFSYKPTSFKTVLVSPGLCLSGDRGIAPKQGYFIKQNDSWMFTGSSYYYPEPISDKNVVFMNSCSVNFTKAPFIYLNNSISELSDFEAELSQWHKNGSGGSGDIIKLLNEQVNKEMQSSNLYMSMSSWCYTHSLDGAGLFLFDHAAEEYEHAKKLIIFLNENNVPVQLTSISAPEHKFEGLTQIFQKAYEHEQHISESINNIVDHAIKSKDHATFNFLQWYVAEQHEEEVLFKDILDKIELIGNENHGLYLADQYVKGIAKSRKSGS

SEQ ID NO: 269 - protein, 1398 aa, Artificial Sequence
  Description of Artificial Sequence: Synthetic polypeptide
VIGDFNCTNSFINDYNKTIPRISEDVVDVSLGLGTYYVLNRVYLNTTLLFTGYFPKSGANFRDLALKGSIYLSTLWYKPPFLSDFNNGIFSKVKNTKLYVNNTLYSEFSTIVIGSVFVNTSYTIVVQPHNGILEITACQYTMCEYPHTVCKSKGSIRNESWHIDSSEPLCLFKKNFTYNVSADWLYFHFYQERGVFYAYYADVGMPTTFLFSLYLGTILSHYYVMPLTCNAISSNTDNETLEYWVTPLSRRQYLLNFDEHGVITNAVDCSSSFLSEIQCKTQSFAPNTGVYDLSGFTVKPVATVYRRIPNLPDCDIDNWLNNVSVPSPLNWERRIFSNCNFNLSTLLRLVHVDSFSCNNLDKSKIFGSCFNSITVDKFAIPNRRRDDLQLGSSGFLQSSNYKIDISSSSCQLYYSLPLVNVTINNFNPSSWNRRYGFGSFNLSSYDVVYSDHCFSVNSDFCPCADPSVVNSCAKSKPPSAICPAGTKYRHCDLDTTLYVKNWCRCSCLPDPISTYSPNTCPQKKVVVGIGEHCPGLGINEEKCGTQLNHSSCFCSPDAFLGWSFDSCISNNRCNIFSNFIFNGINSGTTCSNDLLYSNTEISTGVCVNYDLYGITGQGIFKEVSAAYYNNWQNLLYDSNGNIIGFKDFLTNKTYTILPCYSGRVSAAFYQNSSSPALLYRNLKCSYVLNNISFISQPFYFDSYLGCVLNAVNLTSYSVSSCDLRMGSGFCIDYALPSSGGSGSGISSPYRFVTFEPFNVSFVNDSVETVGGLFEIQIPTNFTIAGHEEFIQTSSPKVTIDCSAFVCSNYAACHDLLSEYGTFCDNINSILNEVNDLLDITQLQVANALMQGVTLSSNLNTNLHSDVDNIDFKSLLGCLGSQCGSSSRSLLEDLLFNKVKLSDVGFVEAYNNCTGGSEIRDLLCVQSFNGIKVLPPILSETQISGYTTAATVAAMFPPWSAAAGVPFSLNVQYRINGLGVTMDVLNKNQKLIANAFNKALLSIQNGFTATNSALAKIQSVVNANAQALNSLLQQLFNKFGAISSSLQEILSRLDPPEAQVQIDRLINGRLTALNAYVSQQLSDITLIKAGASRAIEKVNECVKSQSPRINFCGNGNHILSLVQNAPYGLLFIHFSYKPTSFKTVLVSPGLCLSGDRGIAPKQGYFIKQNDSWMFTGSSYYYPEPISDKNVVFMNSCSVNFTKAPFIYLNNSISELSDFEAELSQWHKQGSGGSGDIIKLLNEQVNKEMQSSNLYMSMSSWCYTHSLDGAGLFLFDHAAEEYEHAKKLIIFLNENNVPVQLTSISAPEHKFEGLTQIFQKAYEHEQHISESINNIVDHAIKSKDHATFNFLQWYVAEQHEEEVLFKDILDKIELIGNENHGLYLADQYVKGIAKSRKSGS

SEQ ID NO: 270 - protein, 1398 aa, Artificial Sequence
  Description of Artificial Sequence: Synthetic polypeptide
VIGDFNCTNSFINDYNKTIPRISEDVVDVSLGLGTYYVLNRVYLNTTLLFTGYFPKSGANFRDLALKGSIYLSTLWYKPPFLSDFNNGIFSKVKNTKLYVNNTLYSEFSTIVIGSVFVNTSYTIVVQPHNGILEITACQYTMCEYPHTVCKSKGSIRNESWHIDSSEPLCLFKKNFTYNVSADWLYFHFYQERGVFYAYYADVGMPTTFLFSLYLGTILSHYYVMPLTCNAISSNTDNETLEYWVTPLSRRQYLLNFDEHGVITNAVDCSSSFLSEIQCKTQSFAPNTGVYDLSGFTVKPVATVYRRIPNLPDCDIDNWLNNVSVPSPLNWERRIFSNCNFNLSTLLRLVHVDSFSCNNLDKSKIFGSCFNSITVDKFAIPNRRRDDLQLGSSGFLQSSNYKIDISSSSCQLYYSLPLVNVTINNFNPSSWNRRYGFGSFNLSSYDVVYSDHCFSVNSDFCPCADPSVVNSCAKSKPPSAICPAGTKYRHCDLDTTLYVKNWCRCSCLPDPISTYSPNTCPQKKVVVGIGEHCPGLGINEEKCGTQLNHSSCFCSPDAFLGWSFDSCISNNRCNIFSNFIFNGINSGTTCSNDLLYSNTEISTGVCVNYDLYGITGQGIFKEVSAAYYNNWQNLLYDSNGNIIGFKDFLTNKTYTILPCYSGRVSAAFYQNSSSPALLYRNLKCSYVLNNISFISQPFYFDSYLGCVLNAVNLTSYSVSSCDLRMGSGFCIDYALPSSGGSGSGISSPYRFVTFEPFNVSFVNDSVETVGGLFEIQIPTNFTIAGHEEFIQTSSPKVTIDCSAFVCSNYAACHDLLSEYGTFCDNINSILNEVNDLLDITQLQVANALMQGVTLSSNLNTNLHSDVDNIDFKSLLGCLGSQCGSSSRSLLEDLLFNKVKLSDVGFVEAYNNCTGGSEIRDLLCVQSFNGIKVLPPILSETQISGYTTAATVAAMFPPWSAAAGVPFSLNVQYRINGLGVTMDVLNKNQKLIANAFNKALLSIQNGFTATNSALAKIQSVVNANAQALNSLLQQLFNKFGAISSSLQEILSRLDPPEAQVQIDRLINGRLTALNAYVSQQLSDITLIKAGASRAIEKVNECVKSQSPRINFCGNGNHILSLVQNAPYGLLFIHFSYKPTSFKTVLVSPGLCLSGDRGIAPKQGYFIKQNDSWMFTGSSYYYPEPISDKNVVFMNSCSVNFTKAPFIYLNNLQSNLQDIEAELSQIHKNGSGGSGDIIKLLNEQVNKEMQSSNLYMSMSSWCYTHSLDGAGLFLFDHAAEEYEHAKKLIIFLNENNVPVQLTSISAPEHKFEGLTQIFQKAYEHEQHISESINNIVDHAIKSKDHATFNFLQWYVAEQHEEEVLFKDILDKIELIGNENHGLYLADQYVKGIAKSRKSGS

SEQ ID NO: 271 - protein, 1398 aa, Artificial Sequence
  Description of Artificial Sequence: Synthetic polypeptide
VIGDFNCTNSFINDYNKTIPRISEDVVDVSLGLGTYYVLNRVYLNTTLLFTGYFPKSGANFRDLALKGSIYLSTLWYKPPFLSDFNNGIFSKVKNTKLYVNNTLYSEFSTIVIGSVFVNTSYTIVVQPHNGILEITACQYTMCEYPHTVCKSKGSIRNESWHIDSSEPLCLFKKNFTYNVSADWLYFHFYQERGVFYAYYADVGMPTTFLFSLYLGTILSHYYVMPLTCNAISSNTDNETLEYWVTPLSRRQYLLNFDEHGVITNAVDCSSSFLSEIQCKTQSFAPNTGVYDLSGFTVKPVATVYRRIPNLPDCDIDNWLNNVSVPSPLNWERRIFSNCNFNLSTLLRLVHVDSFSCNNLDKSKIFGSCFNSITVDKFAIPNRRRDDLQLGSSGFLQSSNYKIDISSSSCQLYYSLPLVNVTINNFNPSSWNRRYGFGSFNLSSYDVVYSDHCFSVNSDFCPCADPSVVNSCAKSKPPSAICPAGTKYRHCDLDTTLYVKNWCRCSCLPDPISTYSPNTCPQKKVVVGIGEHCPGLGINEEKCGTQLNHSSCFCSPDAFLGWSFDSCISNNRCNIFSNFIFNGINSGTTCSNDLLYSNTEISTGVCVNYDLYGITGQGIFKEVSAAYYNNWQNLLYDSNGNIIGFKDFLTNKTYTILPCYSGRVSAAFYQNSSSPALLYRNLKCSYVLNNISFISQPFYFDSYLGCVLNAVNLTSYSVSSCDLRMGSGFCIDYALPSSGGSGSGISSPYRFVTFEPFNVSFVNDSVETVGGLFEIQIPTNFTIAGHEEFIQTSSPKVTIDCSAFVCSNYAACHDLLSEYGTFCDNINSILNEVNDLLDITQLQVANALMQGVTLSSNLNTNLHSDVDNIDFKSLLGCLGSQCGSSSRSLLEDLLFNKVKLSDVGFVEAYNNCTGGSEIRDLLCVQSFNGIKVLPPILSETQISGYTTAATVAAMFPPWSAAAGVPFSLNVQYRINGLGVTMDVLNKNQKLIANAFNKALLSIQNGFTATNSALAKIQSVVNANAQALNSLLQQLFNKFGAISSSLQEILSRLDPPEAQVQIDRLINGRLTALNAYVSQQLSDITLIKAGASRAIEKVNECVKSQSPRINFCGNGNHILSLVQNAPYGLLFIHFSYKPTSFKTVLVSPGLCLSGDRGIAPKQGYFIKQNDSWMFTGSSYYYPEPISDKNVVFMNSCSVNFTKAPFIYLNNLQSNLQDIEAELSQIHKQGSGGSGDIIKLLNEQVNKEMQSSNLYMSMSSWCYTHSLDGAGLFLFDHAAEEYEHAKKLIIFLNENNVPVQLTSISAPEHKFEGLTQIFQKAYEHEQHISESINNIVDHAIKSKDHATFNFLQWYVAEQHEEEVLFKDILDKIELIGNENHGLYLADQYVKGIAKSRKSGS

SEQ ID NO: 272 - protein, 1398 aa, Artificial Sequence
  Description of Artificial Sequence: Synthetic polypeptide
VIGDFNCTNSFINDYNKTIPRISEDVVDVSLGLGTYYVLNRVYLNTTLLFTGYFPKSGANFRDLALKGSIYLSTLWYKPPFLSDFNNGIFSKVKNTKLYVNNTLYSEFSTIVIGSVFVNTSYTIVVQPHNGILEITACQYTMCEYPHTVCKSKGSIRNESWHIDSSEPLCLFKKNFTYNVSADWLYFHFYQERGVFYAYYADVGMPTTFLFSLYLGTILSHYYVMPLTCNAISSNTDNETLEYWVTPLSRRQYLLNFDEHGVITNAVDCSSSFLSEIQCKTQSFAPNTGVYDLSGFTVKPVATVYRRIPNLPDCDIDNWLNNVSVPSPLNWERRIFSNCNFNLSTLLRLVHVDSFSCNNLDKSKIFGSCFNSITVDKFAIPNRRRDDLQLGSSGFLQSSNYKIDISSSSCQLYYSLPLVNVTINNFNPSSWNRRYGFGSFNLSSYDVVYSDHCFSVNSDFCPCADPSVVNSCAKSKPPSAICPAGTKYRHCDLDTTLYVKNWCRCSCLPDPISTYSPNTCPQKKVVVGIGEHCPGLGINEEKCGTQLNHSSCFCSPDAFLGWSFDSCISNNRCNIFSNFIFNGINSGTTCSNDLLYSNTEISTGVCVNYDLYGITGQGIFKEVSAAYYNNWQNLLYDSNGNIIGFKDFLTNKTYTILPCYSGRVSAAFYQNSSSPALLYRNLKCSYVLNNISFISQPFYFDSYLGCVLNAVNLTSYSVSSCDLRMGSGFCIDYALPSSGGSGSGISSPYRFVTFEPFNVSFVNDSVETVGGLFEIQIPTNFTIAGHEEFIQTSSPKVTIDCSAFVCSNYAACHDLLSEYGTFCDNINSILNEVNDLLDITQLQVANALMQGVTLSSNLNTNLHSDVDNIDFKSLLGCLGSQCGSSSRSLLEDLLFNKVKLSDVGFVEAYNNCTGGSEIRDLLCVQSFNGIKVLPPILSETQISGYTTAATVAAMFPPWSAAAGVPFSLNVQYRINGLGVTMDVLNKNQKLIANAFNKALLSIQNGFTATNSALAKIQSVVNANAQALNSLLQQLFNKFGAISSSLQEILSRLDPPEAQVQIDRLINGRLTALNAYVSQQLSDITLIKAGASRAIEKVNECVKSQSPRINFCGNGNHILSLVQNAPYGLLFIHFSYKPTSFKTVLVSPGLCLSGDRGIAPKQGYFIKQNDSWMFTGSSYYYPEPISDKNVVFMNSCSVNFTKAPFIYLNNLQSNLQDLEAELSQLHKNGSGGSGDIIKLLNEQVNKEMQSSNLYMSMSSWCYTHSLDGAGLFLFDHAAEEYEHAKKLIIFLNENNVPVQLTSISAPEHKFEGLTQIFQKAYEHEQHISESINNIVDHAIKSKDHATFNFLQWYVAEQHEEEVLFKDILDKIELIGNENHGLYLADQYVKGIAKSRKSGS

SEQ ID NO: 273 - protein, 1398 aa, Artificial Sequence
  Description of Artificial Sequence: Synthetic polypeptide
VIGDFNCTNSFINDYNKTIPRISEDVVDVSLGLGTYYVLNRVYLNTTLLFTGYFPKSGANFRDLALKGSIYLSTLWYKPPFLSDFNNGIFSKVKNTKLYVNNTLYSEFSTIVIGSVFVNTSYTIVVQPHNGILEITACQYTMCEYPHTVCKSKGSIRNESWHIDSSEPLCLFKKNFTYNVSADWLYFHFYQERGVFYAYYADVGMPTTFLFSLYLGTILSHYYVMPLTCNAISSNTDNETLEYWVTPLSRRQYLLNFDEHGVITNAVDCSSSFLSEIQCKTQSFAPNTGVYDLSGFTVKPVATVYRRIPNLPDCDIDNWLNNVSVPSPLNWERRIFSNCNFNLSTLLRLVHVDSFSCNNLDKSKIFGSCFNSITVDKFAIPNRRRDDLQLGSSGFLQSSNYKIDISSSSCQLYYSLPLVNVTINNFNPSSWNRRYGFGSFNLSSYDVVYSDHCFSVNSDFCPCADPSVVNSCAKSKPPSAICPAGTKYRHCDLDTTLYVKNWCRCSCLPDPISTYSPNTCPQKKVVVGIGEHCPGLGINEEKCGTQLNHSSCFCSPDAFLGWSFDSCISNNRCNIFSNFIFNGINSGTTCSNDLLYSNTEISTGVCVNYDLYGITGQGIFKEVSAAYYNNWQNLLYDSNGNIIGFKDFLTNKTYTILPCYSGRVSAAFYQNSSSPALLYRNLKCSYVLNNISFISQPFYFDSYLGCVLNAVNLTSYSVSSCDLRMGSGFCIDYALPSSGGSGSGISSPYRFVTFEPFNVSFVNDSVETVGGLFEIQIPTNFTIAGHEEFIQTSSPKVTIDCSAFVCSNYAACHDLLSEYGTFCDNINSILNEVNDLLDITQLQVANALMQGVTLSSNLNTNLHSDVDNIDFKSLLGCLGSQCGSSSRSLLEDLLFNKVKLSDVGFVEAYNNCTGGSEIRDLLCVQSFNGIKVLPPILSETQISGYTTAATVAAMFPPWSAAAGVPFSLNVQYRINGLGVTMDVLNKNQKLIANAFNKALLSIQNGFTATNSALAKIQSVVNANAQALNSLLQQLFNKFGAISSSLQEILSRLDPPEAQVQIDRLINGRLTALNAYVSQQLSDITLIKAGASRAIEKVNECVKSQSPRINFCGNGNHILSLVQNAPYGLLFIHFSYKPTSFKTVLVSPGLCLSGDRGIAPKQGYFIKQNDSWMFTGSSYYYPEPISDKNVVFMNSCSVNFTKAPFIYLNNLQSNLQDLEAELSQLHKQGSGGSGDIIKLLNEQVNKEMQSSNLYMSMSSWCYTHSLDGAGLFLFDHAAEEYEHAKKLIIFLNENNVPVQLTSISAPEHKFEGLTQIFQKAYEHEQHISESINNIVDHAIKSKDHATFNFLQWYVAEQHEEEVLFKDILDKIELIGNENHGLYLADQYVKGIAKSRKSGS

SEQ ID NO: 274 - protein, 1398 aa, Artificial Sequence
  Description of Artificial Sequence: Synthetic polypeptide
VIGDFNCTNSFINDYNKTIPRISEDVVDVSLGLGTYYVLNRVYLNTTLLFTGYFPKSGANFRDLALKGSIYLSTLWYKPPFLSDFNNGIFSKVKNTKLYVNNTLYSEFSTIVIGSVFVNTSYTIVVQPHNGILEITACQYTMCEYPHTVCKSKGSIRNESWHIDSSEPLCLFKKNFTYNVSADWLYFHFYQERGVFYAYYADVGMPTTFLFSLYLGTILSHYYVMPLTCNAISSNTDNETLEYWVTPLSRRQYLLNFDEHGVITNAVDCSSSFLSEIQCKTQSFAPNTGVYDLSGFTVKPVATVYRRIPNLPDCDIDNWLNNVSVPSPLNWERRIFSNCNFNLSTLLRLVHVDSFSCNNLDKSKIFGSCFNSITVDKFAIPNRRRDDLQLGSSGFLQSSNYKIDISSSSCQLYYSLPLVNVTINNFNPSSWNRRYGFGSFNLSSYDVVYSDHCFSVNSDFCPCADPSVVNSCAKSKPPSAICPAGTKYRHCDLDTTLYVKNWCRCSCLPDPISTYSPNTCPQKKVVVGIGEHCPGLGINEEKCGTQLNHSSCFCSPDAFLGWSFDSCISNNRCNIFSNFIFNGINSGTTCSNDLLYSNTEISTGVCVNYDLYGITGQGIFKEVSAAYYNNWQNLLYDSNGNIIGFKDFLTNKTYTILPCYSGRVSAAFYQNSSSPALLYRNLKCSYVLNNISFISQPFYFDSYLGCVLNAVNLTSYSVSSCDLRMGSGFCIDYALPSSGGSGSGISSPYRFVTFEPFNVSFVNDSVETVGGLFEIQIPTNFTIAGHEEFIQTSSPKVTIDCSAFVCSNYAACHDLLSEYGTFCDNINSILNEVNDLLDITQLQVANALMQGVTLSSNLNTNLHSDVDNIDFKSLLGCLGSQCGSSSRSLLEDLLFNKVKLSDVGFVEAYNNCTGGSEIRDLLCVQSFNGIKVLPPILSETQISGYTTAATVAAMFPPWSAAAGVPFSLNVQYRINGLGVTMDVLNKNQKLIANAFNKALLSIQNGFTATNSALAKIQSVVNANAQALNSLLQQLFNKFGAISSSLQEILSRLDPPEAQVQIDRLINGRLTALNAYVSQQLSDITLIKAGASRAIEKVNECVKSQSPRINFCGNGNHILSLVQNAPYGLLFIHFSYKPTSFKTVLVSPGLCLSGDRGIAPKQGYFIKQNDSWMFTGSSYYYPEPISDKNVVFMNSCSVNFTKAPFIYLNNSISNLQDIEAELSQIHKQGSGGSGDIIKLLNEQVNKEMQSSNLYMSMSSWCYTHSLDGAGLFLFDHAAEEYEHAKKLIIFLNENNVPVQLTSISAPEHKFEGLTQIFQKAYEHEQHISESINNIVDHAIKSKDHATFNFLQWYVAEQHEEEVLFKDILDKIELIGNENHGLYLADQYVKGIAKSRKSGS

SEQ ID NO: 275 - protein, 1398 aa, Artificial Sequence
  Description of Artificial Sequence: Synthetic polypeptide
VIGDFNCTNSFINDYNKTIPRISEDVVDVSLGLGTYYVLNRVYLNTTLLFTGYFPKSGANFRDLALKGSIYLSTLWYKPPFLSDFNNGIFSKVKNTKLYVNNTLYSEFSTIVIGSVFVNTSYTIVVQPHNGILEITACQYTMCEYPHTVCKSKGSIRNESWHIDSSEPLCLFKKNFTYNVSADWLYFHFYQERGVFYAYYADVGMPTTFLFSLYLGTILSHYYVMPLTCNAISSNTDNETLEYWVTPLSRRQYLLNFDEHGVITNAVDCSSSFLSEIQCKTQSFAPNTGVYDLSGFTVKPVATVYRRIPNLPDCDIDNWLNNVSVPSPLNWERRIFSNCNFNLSTLLRLVHVDSFSCNNLDKSKIFGSCFNSITVDKFAIPNRRRDDLQLGSSGFLQSSNYKIDISSSSCQLYYSLPLVNVTINNFNPSSWNRRYGFGSFNLSSYDVVYSDHCFSVNSDFCPCADPSVVNSCAKSKPPSAICPAGTKYRHCDLDTTLYVKNWCRCSCLPDPISTYSPNTCPQKKVVVGIGEHCPGLGINEEKCGTQLNHSSCFCSPDAFLGWSFDSCISNNRCNIFSNFIFNGINSGTTCSNDLLYSNTEISTGVCVNYDLYGITGQGIFKEVSAAYYNNWQNLLYDSNGNIIGFKDFLTNKTYTILPCYSGRVSAAFYQNSSSPALLYRNLKCSYVLNNISFISQPFYFDSYLGCVLNAVNLTSYSVSSCDLRMGSGFCIDYALPSSGGSGSGISSPYRFVTFEPFNVSFVNDSVETVGGLFEIQIPTNFTIAGHEEFIQTSSPKVTIDCSAFVCSNYAACHDLLSEYGTFCDNINSILNEVNDLLDITQLQVANALMQGVTLSSNLNTNLHSDVDNIDFKSLLGCLGSQCGSSSRSLLEDLLFNKVKLSDVGFVEAYNNCTGGSEIRDLLCVQSFNGIKVLPPILSETQISGYTTAATVAAMFPPWSAAAGVPFSLNVQYRINGLGVTMDVLNKNQKLIANAFNKALLSIQNGFTATNSALAKIQSVVNANAQALNSLLQQLFNKFGAISSSLQEILSRLDPPEAQVQIDRLINGRLTALNAYVSQQLSDITLIKAGASRAIEKVNECVKSQSPRINFCGNGNHILSLVQNAPYGLLFIHFSYKPTSFKTVLVSPGLCLSGDRGIAPKQGYFIKQNDSWMFTGSSYYYPEPISDKNVVFMNSCSVNFTKAPFIYLNNSISNLQDLEAELSQLHKQGSGGSGDIIKLLNEQVNKEMQSSNLYMSMSSWCYTHSLDGAGLFLFDHAAEEYEHAKKLIIFLNENNVPVQLTSISAPEHKFEGLTQIFQKAYEHEQHISESINNIVDHAIKSKDHATFNFLQWYVAEQHEEEVLFKDILDKIELIGNENHGLYLADQYVKGIAKSRKSGS

SEQ ID NO: 276 - protein, 390 aa, Artificial Sequence
  Description of Artificial Sequence: Synthetic polypeptide
EGVECDFSPLLSGTPPQVYNFKRLVFTNCNYNLTKLLSLFSVNDFTCSQISPAAIASNCYSSLILDYFSYPLSMKSDLSVSSAGPISQFNYKQSFSNPTCLILATVPHNLTTITKPLKYSYINKCSRLLSDDRTEVPQLVNANQYSPCVSIVPSTVWEDGDYYRKQLSPLEGGGWLVASGSTVAMTEQLQMGFGITVQYGTDTNSVCPKGSGGGGESQVRQQFSKDIEKLLNEQVNKEMQSSNLYMSMSSWCYTHSLDGAGLFLFDHAAEEYEHAKKLIIFLNENNVPVQLTSISAPEHKFEGLTQIFQKAYEHEQHISESINNIVDHAIKSKDHATFNFLQWYVAEQHEEEVLFKDILDKIELIGNENHGLYLADQYVKGIAKSRKSGS

SEQ ID NO: 277 - protein, 387 aa, Artificial Sequence
  Description of Artificial Sequence: Synthetic polypeptide
ECDFSPLLSGTPPQVYNFKRLVFTNCNYNLTKLLSLFSVNDFTCSQISPAAIASNCYSSLILDYFSYPLSMKSDLSVSSAGPISQFNYKQSFSNPTCLILATVPHNLTTITKPLKYSYINKCSRLLSDDRTEVPQLVNANQYSPCVSIVPSTVWEDGDYYRKQLSPLEGGGWLVASGSTVAMTEQLQMGFGITVQYGTDTNSVCPKGSGGGGESQVRQQFSKDIEKLLNEQVNKEMQSSNLYMSMSSWCYTHSLDGAGLFLFDHAAEEYEHAKKLIIFLNENNVPVQLTSISAPEHKFEGLTQIFQKAYEHEQHISESINNIVDHAIKSKDHATFNFLQWYVAEQHEEEVLFKDILDKIELIGNENHGLYLADQYVKGIAKSRKSGS

SEQ ID NO: 278 - protein, 390 aa, Artificial Sequence
  Description of Artificial Sequence: Synthetic polypeptide
EGVECDFSPLLSGTPPQVYNFKRLVFTNCNYNLTKLLSLFSVNDFTCSQISPAAIASNCYSSLILDYFSYPLSMKSDLSVSSAGPISQFNYKQSFSNPTCLILATVPHNLTTITKPLKYSYINKCSRLLSDDRTEVPQLVNANQYSPCVSIVPSTVWEDGDYYRKQLSPLEGGGWLVASGSTVAMTEQLQMGFGITVQNGTDTNSVCPKGSGGGGESQVRQQFSKDIEKLLNEQVNKEMQSSNLYMSMSSWCYTHSLDGAGLFLFDHAAEEYEHAKKLIIFLNENNVPVQLTSISAPEHKFEGLTQIFQKAYEHEQHISESINNIVDHAIKSKDHATFNFLQWYVAEQHEEEVLFKDILDKIELIGNENHGLYLADQYVKGIAKSRKSGS

SEQ ID NO: 279 - protein, 390 aa, Artificial Sequence
  Description of Artificial Sequence: Synthetic polypeptide
EGVECDFSPLLSGTPPQVYNFKRLVFTNCNYNLTKLLSLFSVNDFTCSQISPAAIASNCYSSLILDYFSYPLSMKSDLSVSSAGPISQFNYKQSFSNPTCLILATVPHNLTTITKPLKYSYINKCSRLLSDDRTEVPQLVNANQYSPCVSIVPSTVWEDGDYYRKQLSPLEGGGWLVASGSTVAMTEQLQMGFGITVQRGTDTNSVCPKGSGGGGESQVRQQFSKDIEKLLNEQVNKEMQSSNLYMSMSSWCYTHSLDGAGLFLFDHAAEEYEHAKKLIIFLNENNVPVQLTSISAPEHKFEGLTQIFQKAYEHEQHISESINNIVDHAIKSKDHATFNFLQWYVAEQHEEEVLFKDILDKIELIGNENHGLYLADQYVKGIAKSRKSGS

SEQ ID NO: 280 - protein, 387 aa, Artificial Sequence
  Description of Artificial Sequence: Synthetic polypeptide
ECDFSPLLSGTPPQVYNFKRLVFTNCNYNLTKLLSLFSVNDFTCSQISPAAIASNCYSSLILDYFSYPLSMKSDLSVSSAGPISQFNYKQSFSNPTCLILATVPHNLTTITKPLKYSYINKCSRLLSDDRTEVPQLVNANQYSPCVSIVPSTVWEDGDYYRKQLSPLEGGGWLVASGSTVAMTEQLQMGFGITVQNGTDTNSVCPKGSGGGGESQVRQQFSKDIEKLLNEQVNKEMQSSNLYMSMSSWCYTHSLDGAGLFLFDHAAEEYEHAKKLIIFLNENNVPVQLTSISAPEHKFEGLTQIFQKAYEHEQHISESINNIVDHAIKSKDHATFNFLQWYVAEQHEEEVLFKDILDKIELIGNENHGLYLADQYVKGIAKSRKSGS

SEQ ID NO: 281 - protein, 387 aa, Artificial Sequence
  Description of Artificial Sequence: Synthetic polypeptide
ECDFSPLLSGTPPQVYNFKRLVFTNCNYNLTKLLSLFSVNDFTCSQISPAAIASNCYSSLILDYFSYPLSMKSDLSVSSAGPISQFNYKQSFSNPTCLILATVPHNLTTITKPLKYSYINKCSRLLSDDRTEVPQLVNANQYSPCVSIVPSTVWEDGDYYRKQLSPLEGGGWLVASGSTVAMTEQLQMGFGITVQRGTDTNSVCPKGSGGGGESQVRQQFSKDIEKLLNEQVNKEMQSSNLYMSMSSWCYTHSLDGAGLFLFDHAAEEYEHAKKLIIFLNENNVPVQLTSISAPEHKFEGLTQIFQKAYEHEQHISESINNIVDHAIKSKDHATFNFLQWYVAEQHEEEVLFKDILDKIELIGNENHGLYLADQYVKGIAKSRKSGS

SEQ ID NO: 282 - DNA, 831 bp, Artificial Sequence
  Description of Artificial Sequence: Synthetic polynucleotide
atggactctaagggcagctcccagaagggcagcaggctgctgctgctgctggtggtgagcaacctgctgctgcctcagggcgtggtgggcaacatcaccaatctgtgcccattcggcgaggtgtttaatgccacacgcttcgcctccgtgtatgcctggaaccggaagagaatcagcaattgcgtggccgactattccgtgctgtacaactctgccagcttctccacctttaagtgctatggcgtgagccctaccaagctgaacgacctgtgcttcacaaacgtgtacgccgactcctttgtgatccggggcgatgaggtgagacagatcgcaccaggacagaccggcaagatcgcagactacaactataagctgcctgacgacttcaccggctgcgtgatcgcctggaattccaacaatctggattctaaagtgggcggcaactacaattatctgtacaggctgttccgcaagagcaacctgaagccatttgagcgggatatctccaccgagatctaccaggccggctctacaccctgcaacggcgtggagggcttcaattgttattttcctctgcagtcctacggcttccagccaaccaatggcgtgggctatcagccctaccgggtggtggtgctgtcttttgagctgctgcacgcaccagcaaccgtgtgcggacctctggaggtgctgttccagggaccatctgcctggagccacccacagtttgagaagggaggaggctctggaggaggctccggaggctctgcctggagccacccccagttcgagaagggcagccatcatcatcaccaccaccaccactgatga

SEQ ID NO: 283 - protein, 245 aa, Artificial Sequence
  Description of Artificial Sequence: Synthetic polypeptide
NITNLCPFGEVFNATRFASVYAWNRKRISNCVADYSVLYNSASFSTFKCYGVSPTKLNDLCFTNVYADSFVIRGDEVRQIAPGQTGKIADYNYKLPDDFTGCVIAWNSNNLDSKVGGNYNYLYRLFRKSNLKPFERDISTEIYQAGSTPCNGVEGFNCYFPLQSYGFQPTNGVGYQPYRVVVLSFELLHAPATVCGPLEVLFQGPSAWSHPQFEKGGGSGGGSGGSAWSHPQFEKGSHHHHHHHH

SEQ ID NO: 284 - protein, 1310 aa, Artificial Sequence
  Description of Artificial Sequence: Synthetic polypeptide
VNLTTRTQLPPAYTNSFTRGVYYPDKVFRSSVLHSTQDLFLPFFSNVTWFHAIHVSGTNGTKRFDNPVLPFNDGVYFASTEKSNIIRGWIFGTTLDSKTQSLLIVNNATNVVIKVCEFQFCNDPFLGVYYHKNNKSWMESEFRVYSSANNCTFEYVSQPFLMDLEGKQGNFKNLREFVFKNIDGYFKIYSKHTPINLVRDLPQGFSALEPLVDLPIGINITRFQTLLALHRSYLTPGDSSSGWTAGAAAYYVGYLQPRTFLLKYNENGTITDAVDCALDPLSETKCTLKSFTVEKGIYQTSNFRVQPTESIVRFPNITNLCPFGEVFNATRFASVYAWNRKRISNCVADYSVLYNSASFSTFKCYGVCPTKLNDLCFTNVYADSFVIRGDEVRQIAPGQTGKIADYNYKLPDDFTGCVIAWNSNNLDSKVGGNYNYLYRLFRKSNLKPFERDISTEIYQAGSTPCNGVEGFNCYFPLQSYGFQPTNGVGYQPYRVVVLSFELLHAPATVCGPKKSTNLVKNKCVNFNFNGLTGTGVLTESNKKFLPFQQFGRDIADTTDAVRDPQTLEILDITPCSFGGVSVITPGTNTSNQVAVLYQGVNCTEVPVAIHADQLTPTWRVYSTGSNVFQTRAGCLIGAEHVNNSYECDIPIGAGICASYQTQTNSPGSASSVASQSIIAYTMSLGAENSVAYSNNSIAIPTNFTISVTTEILPVSMTKTSVDCTMYICGDSTECSNLLLQYGSFCTQLNRALTGIAVEQDKNTQEVFAQVKQIYKTPPIKDFGGFNFSQILPDPSKPSKRSFIEDLLFNKVTLADAGFIKQYGDCLGDIAARDLICAQKFNGLTVLPPLLTDEMIAQYTSALLAGTITSGWTFGAGAALQIPFAMQMAYRFNGIGVTQNVLYENQKLIANQFNSAIGKIQDSLSSTASALGKLQDVVNQNAQALNTLVKQLSSNFGAISSVLNDILSRLCPPEAEVQIDRLITGRLQSLQTYVTQQLIRAAEIRASANLAATKMSECVLGQSKRVDFCGKGYHLMSFPQSAPHGVVFLHVTYVPAQEKNFTTAPAICHDGKAHFPREGVFVSNGTHWFVTQRNFYEPQIITTDNTFVSGNCDVVIGIVNNTVYDPLQPELDSFKEELDKGSGGSGDIIKLLNEQVNKEMQSSNLYMSMSSWCYTHSLDGAGLFLFDHAAEEYEHAKKLIIFLNENNVPVQLTSISAPEHKFEGLTQIFQKAYEHEQHISESINNIVDHAIKSKDHATFNFLQWYVAEQHEEEVLFKDILDKIELIGNENHGLYLADQYVKGIAKSRKSGS

SEQ ID NO: 285 - protein, 1318 aa, Artificial Sequence
  Description of Artificial Sequence: Synthetic polypeptide
SSQCVNLTTRTQLPPAYTNSFTRGVYYPDKVFRSSVLHSTQDLFLPFFSNVTWFHAIHVSGTNGTKRFDNPVLPFNDGVYFASTEKSNIIRGWIFGTTLDSKTQSLLIVNNATNVVIKVCEFQFCNDPFLGVYYHKNNKSWMESEFRVYSSANNCTFEYVSQPFLMDLEGKQGNFKNLREFVFKNIDGYFKIYSKHTPINLVRDLPQGFSALEPLVDLPIGINITRFQTLLALHRSYLTPGDSSSGWTAGAAAYYVGYLQPRTFLLKYNENGTITDAVDCALDPLSETKCTLKSFTVEKGIYQTSNFRVQPTESIVRFPNITNLCPFGEVFNATRFASVYAWNRKRISNCVADYSVLYNSASFSTFKCYGVCPTKLNDLCFTNVYADSFVIRGDEVRQIAPGQTGKIADYNYKLPDDFTGCVIAWNSNNLDSKVGGNYNYLYRLFRKSNLKPFERDISTEIYQAGSTPCNGVEGFNCYFPLQSYGFQPTNGVGYQPYRVVVLSFELLHAPATVCGPKKSTNLVKNKCVNFNFNGLTGTGVLTESNKKFLPFQQFGRDIADTTDAVRDPQTLEILDITPCSFGGVSVITPGTNTSNQVAVLYQGVNCTEVPVAIHADQLTPTWRVYSTGSNVFQTRAGCLIGAEHVNNSYECDIPIGAGICASYQTQTNSPGSASSVASQSIIAYTMSLGAENSVAYSNNSIAIPTNFTISVTTEILPVSMTKTSVDCTMYICGDSTECSNLLLQYGSFCTQLNRALTGIAVEQDKNTQEVFAQVKQIYKTPPIKDFGGFNFSQILPDPSKPSKRSFIEDLLFNKVTLADAGFIKQYGDCLGDIAARDLICAQKFNGLTVLPPLLTDEMIAQYTSALLAGTITSGWTFGAGAALQIPFAMQMAYRFNGIGVTQNVLYENQKLIANQFNSAIGKIQDSLSSTASALGKLQDVVNQNAQALNTLVKQLSSNFGAISSVLNDILSRLCPPEAEVQIDRLITGRLQSLQTYVTQQLIRAAEIRASANLAATKMSECVLGQSKRVDFCGKGYHLMSFPQSAPHGVVFLHVTYVPAQEKNFTTAPAICHDGKAHFPREGVFVSNGTHWFVTQRNFYEPQIITTDNTFVSGNCDVVIGIVNNTVYDPLQSELDSIKEELDKIHKNGSGGSGDIIKLLNEQVNKEMQSSNLYMSMSSWCYTHSLDGAGLFLFDHAAEEYEHAKKLIIFLNENNVPVQLTSISAPEHKFEGLTQIFQKAYEHEQHISESINNIVDHAIKSKDHATFNFLQWYVAEQHEEEVLFKDILDKIELIGNENHGLYLADQYVKGIAKSRKSGS

SEQ ID NO: 286 - protein, 1332 aa, Artificial Sequence
  Description of Artificial Sequence: Synthetic polypeptide
SSQCVNLTTRTQLPPAYTNSFTRGVYYPDKVFRSSVLHSTQDLFLPFFSNVTWFHAIHVSGTNGTKRFDNPVLPFNDGVYFASTEKSNIIRGWIFGTTLDSKTQSLLIVNNATNVVIKVCEFQFCNDPFLGVYYHKNNKSWMESEFRVYSSANNCTFEYVSQPFLMDLEGKQGNFKNLREFVFKNIDGYFKIYSKHTPINLVRDLPQGFSALEPLVDLPIGINITRFQTLLALHRSYLTPGDSSSGWTAGAAAYYVGYLQPRTFLLKYNENGTITDAVDCALDPLSETKCTLKSFTVEKGIYQTSNFRVQPTESIVRFPNITNLCPFGEVFNATRFASVYAWNRKRISNCVADYSVLYNSASFSTFKCYGVCPTKLNDLCFTNVYADSFVIRGDEVRQIAPGQTGKIADYNYKLPDDFTGCVIAWNSNNLDSKVGGNYNYLYRLFRKSNLKPFERDISTEIYQAGSTPCNGVEGFNCYFPLQSYGFQPTNGVGYQPYRVVVLSFELLHAPATVCGPKKSTNLVKNKCVNFNFNGLTGTGVLTESNKKFLPFQQFGRDIADTTDAVRDPQTLEILDITPCSFGGVSVITPGTNTSNQVAVLYQGVNCTEVPVAIHADQLTPTWRVYSTGSNVFQTRAGCLIGAEHVNNSYECDIPIGAGICASYQTQTNSPGSASSVASQSIIAYTMSLGAENSVAYSNNSIAIPTNFTISVTTEILPVSMTKTSVDCTMYICGDSTECSNLLLQYGSFCTQLNRALTGIAVEQDKNTQEVFAQVKQIYKTPPIKDFGGFNFSQILPDPSKPSKRSFIEDLLFNKVTLADAGFIKQYGDCLGDIAARDLICAQKFNGLTVLPPLLTDEMIAQYTSALLAGTITSGWTFGAGAALQIPFAMQMAYRFNGIGVTQNVLYENQKLIANQFNSAIGKIQDSLSSTASALGKLQDVVNQNAQALNTLVKQLSSNFGAISSVLNDILSRLCPPEAEVQIDRLITGRLQSLQTYVTQQLIRAAEIRASANLAATKMSECVLGQSKRVDFCGKGYHLMSFPQSAPHGVVFLHVTYVPAQEKNFTTAPAICHDGKAHFPREGVFVSNGTHWFVTQRNFYEPQIITTDNTFVSGNCDVVIGIVNNTVYDPLQSELDSIKEELDKIHKNLDSIKEELDKIHKNGSGGSGDIIKLLNEQVNKEMQSSNLYMSMSSWCYTHSLDGAGLFLFDHAAEEYEHAKKLIIFLNENNVPVQLTSISAPEHKFEGLTQIFQKAYEHEQHISESINNIVDHAIKSKDHATFNFLQWYVAEQHEEEVLFKDILDKIELIGNENHGLYLADQYVKGIAKSRKSGS

SEQ ID NO: 287 - protein, 1310 aa, Artificial Sequence
  Description of Artificial Sequence: Synthetic polypeptide
VNLTTRTQLPPAYTNSFTRGVYYPDKVFRSSVLHSTQDLFLPFFSNVTWFHAIHVSGTNGTKRFDNPVLPFNDGVYFASTEKSNIIRGWIFGTTLDSKTQSLLIVNNATNVVIKVCEFQFCNDPFLGVYYHKNNKSWMESEFRVYSSANQCTFEYVSQPFLMDLEGKQGNFKNLREFVFKNIDGYFKIYSKHTPINLVRDLPQGFSALEPLVDLPIGINITRFQTLLALHRSYLTPGDSSSGWTAGAAAYYVGYLQPRTFLLKYNENGTITDAVDCALDPLSETKCTLKSFTVEKGIYQTSNFRVQPTESIVRFPNITNLCPFGEVFNATRFASVYAWNRKRISNCVADYSVLYNSASFSTFKCYGVSPTKLNDLCFTNVYADSFVIRGDEVRQIAPGQTGKIADYNYKLPDDFTGCVIAWNSNNLDSKVGGNYNYLYRLFRKSNLKPFERDISTEIYQAGSTPCNGVEGFNCYFPLQSYGFQPTNGVGYQPYRVVVLSFELLHAPATVCGPKKSTNLVKNKCVNFNFNGLTGTGVLTESNKKFLPFQQFGRDIADTTDAVRDPQTLEILDITPCSFGGVSVITPGTNTSNQVAVLYQDVNCTEVPVAIHADQLTPTWRVYSTGSNVFQTRAGCLIGAEHVNNSYECDIPIGAGICASYQTQTNSPGSASSVASQSIIAYTMSLGAENSVAYSNNSIAIPTNFTISVTTEILPVSMTKTSVDCTMYICGDSTECSNLLLQYGSFCTQLNRALTGIAVEQDKNTQEVFAQVKQIYKTPPIKDFGGFNFSQILPDPSKPSKRSFIEDLLFNKVTLADAGFIKQYGDCLGDIAARDLICAQKFNGLTVLPPLLTDEMIAQYTSALLAGTITSGWTFGAGAALQIPFAMQMAYRFNGIGVTQNVLYENQKLIANQFNSAIGKIQDSLSSTASALGKLQDVVNQNAQALNTLVKQLSSNFGAISSVLNDILSRLDPPEAEVQIDRLITGRLQSLQTYVTQQLIRAAEIRASANLAATKMSECVLGQSKRVDFCGKGYHLMSFPQSAPHGVVFLHVTYVPAQEKNFTTAPAICHDGKAHFPREGVFVSNGTHWFVTQRNFYEPQIITTDNTFVSGNCDVVIGIVNNTVYDPLQPELDSFKEELDKGSGGSGDIIKLLNEQVNKEMQSSNLYMSMSSWCYTHSLDGAGLFLFDHAAEEYEHAKKLIIFLNENNVPVQLTSISAPEHKFEGLTQIFQKAYEHEQHISESINNIVDHAIKSKDHATFNFLQWYVAEQHEEEVLFKDILDKIELIGNENHGLYLADQYVKGIAKSRKSGS

SEQ ID NO: 288 - protein, 1310 aa, Artificial Sequence
  Description of Artificial Sequence: Synthetic polypeptide
VNLTTRTQLPPAYTNSFTRGVYYPDKVFRSSVLHSTQDLFLPFFSNVTWFHAIHVSGTNGTKRFDNPVLPFNDGVYFASTEKSNIIRGWIFGTTLDSKTQSLLIVNNATNVVIKVCEFQFCNDPFLGVYYHKNNKSWMESEFRVYSSANNCTFEYVSQPFLMDLEGKQGNFKNLREFVFKNIDGYFKIYSKHTPINLVRDLPQGFSALEPLVDLPIGIQITRFQTLLALHRSYLTPGDSSSGWTAGAAAYYVGYLQPRTFLLKYNENGTITDAVDCALDPLSETKCTLKSFTVEKGIYQTSNFRVQPTESIVRFPNITNLCPFGEVFNATRFASVYAWNRKRISNCVADYSVLYNSASFSTFKCYGVSPTKLNDLCFTNVYADSFVIRGDEVRQIAPGQTGKIADYNYKLPDDFTGCVIAWNSNNLDSKVGGNYNYLYRLFRKSNLKPFERDISTEIYQAGSTPCNGVEGFNCYFPLQSYGFQPTNGVGYQPYRVVVLSFELLHAPATVCGPKKSTNLVKNKCVNFNFNGLTGTGVLTESNKKFLPFQQFGRDIADTTDAVRDPQTLEILDITPCSFGGVSVITPGTNTSNQVAVLYQDVNCTEVPVAIHADQLTPTWRVYSTGSNVFQTRAGCLIGAEHVNNSYECDIPIGAGICASYQTQTNSPGSASSVASQSIIAYTMSLGAENSVAYSNNSIAIPTNFTISVTTEILPVSMTKTSVDCTMYICGDSTECSNLLLQYGSFCTQLNRALTGIAVEQDKNTQEVFAQVKQIYKTPPIKDFGGFNFSQILPDPSKPSKRSFIEDLLFNKVTLADAGFIKQYGDCLGDIAARDLICAQKFNGLTVLPPLLTDEMIAQYTSALLAGTITSGWTFGAGAALQIPFAMQMAYRFNGIGVTQNVLYENQKLIANQFNSAIGKIQDSLSSTASALGKLQDVVNQNAQALNTLVKQLSSNFGAISSVLNDILSRLDPPEAEVQIDRLITGRLQSLQTYVTQQLIRAAEIRASANLAATKMSECVLGQSKRVDFCGKGYHLMSFPQSAPHGVVFLHVTYVPAQEKNFTTAPAICHDGKAHFPREGVFVSNGTHWFVTQRNFYEPQIITTDNTFVSGNCDVVIGIVNNTVYDPLQPELDSFKEELDKGSGGSGDIIKLLNEQVNKEMQSSNLYMSMSSWCYTHSLDGAGLFLFDHAAEEYEHAKKLIIFLNENNVPVQLTSISAPEHKFEGLTQIFQKAYEHEQHISESINNIVDHAIKSKDHATFNFLQWYVAEQHEEEVLFKDILDKIELIGNENHGLYLADQYVKGIAKSRKSGS

SEQ ID NO: 289 - protein, 1318 aa, Artificial Sequence
  Description of Artificial Sequence: Synthetic polypeptide
SSQCVNLTTRTQLPPAYTNSFTRGVYYPDKVFRSSVLHSTQDLFLPFFSNVTWFHAIHVSGTNGTKRFDNPVLPFNDGVYFASTEKSNIIRGWIFGTTLDSKTQSLLIVNNATNVVIKVCEFQFCNDPFLGVYYHKNNKSWMESEFRVYSSANQCTFEYVSQPFLMDLEGKQGNFKNLREFVFKNIDGYFKIYSKHTPINLVRDLPQGFSALEPLVDLPIGINITRFQTLLALHRSYLTPGDSSSGWTAGAAAYYVGYLQPRTFLLKYNENGTITDAVDCALDPLSETKCTLKSFTVEKGIYQTSNFRVQPTESIVRFPNITNLCPFGEVFNATRFASVYAWNRKRISNCVADYSVLYNSASFSTFKCYGVSPTKLNDLCFTNVYADSFVIRGDEVRQIAPGQTGKIADYNYKLPDDFTGCVIAWNSNNLDSKVGGNYNYLYRLFRKSNLKPFERDISTEIYQAGSTPCNGVEGFNCYFPLQSYGFQPTNGVGYQPYRVVVLSFELLHAPATVCGPKKSTNLVKNKCVNFNFNGLTGTGVLTESNKKFLPFQQFGRDIADTTDAVRDPQTLEILDITPCSFGGVSVITPGTNTSNQVAVLYQDVNCTEVPVAIHADQLTPTWRVYSTGSNVFQTRAGCLIGAEHVNNSYECDIPIGAGICASYQTQTNSPGSASSVASQSIIAYTMSLGAENSVAYSNNSIAIPTNFTISVTTEILPVSMTKTSVDCTMYICGDSTECSNLLLQYGSFCTQLNRALTGIAVEQDKNTQEVFAQVKQIYKTPPIKDFGGFNFSQILPDPSKPSKRSFIEDLLFNKVTLADAGFIKQYGDCLGDIAARDLICAQKFNGLTVLPPLLTDEMIAQYTSALLAGTITSGWTFGAGAALQIPFAMQMAYRFNGIGVTQNVLYENQKLIANQFNSAIGKIQDSLSSTASALGKLQDVVNQNAQALNTLVKQLSSNFGAISSVLNDILSRLDPPEAEVQIDRLITGRLQSLQTYVTQQLIRAAEIRASANLAATKMSECVLGQSKRVDFCGKGYHLMSFPQSAPHGVVFLHVTYVPAQEKNFTTAPAICHDGKAHFPREGVFVSNGTHWFVTQRNFYEPQIITTDNTFVSGNCDVVIGIVNNTVYDPLQSELDSIKEELDKIHKNGSGGSGDIIKLLNEQVNKEMQSSNLYMSMSSWCYTHSLDGAGLFLFDHAAEEYEHAKKLIIFLNENNVPVQLTSISAPEHKFEGLTQIFQKAYEHEQHISESINNIVDHAIKSKDHATFNFLQWYVAEQHEEEVLFKDILDKIELIGNENHGLYLADQYVKGIAKSRKSGS

SEQ ID NO: 290 - protein, 1318 aa, Artificial Sequence
  Description of Artificial Sequence: Synthetic polypeptide
SSQCVNLTTRTQLPPAYTNSFTRGVYYPDKVFRSSVLHSTQDLFLPFFSNVTWFHAIHVSGTNGTKRFDNPVLPFNDGVYFASTEKSNIIRGWIFGTTLDSKTQSLLIVNNATNVVIKVCEFQFCNDPFLGVYYHKNNKSWMESEFRVYSSANNCTFEYVSQPFLMDLEGKQGNFKNLREFVFKNIDGYFKIYSKHTPINLVRDLPQGFSALEPLVDLPIGIQITRFQTLLALHRSYLTPGDSSSGWTAGAAAYYVGYLQPRTFLLKYNENGTITDAVDCALDPLSETKCTLKSFTVEKGIYQTSNFRVQPTESIVRFPNITNLCPFGEVFNATRFASVYAWNRKRISNCVADYSVLYNSASFSTFKCYGVSPTKLNDLCFTNVYADSFVIRGDEVRQIAPGQTGKIADYNYKLPDDFTGCVIAWNSNNLDSKVGGNYNYLYRLFRKSNLKPFERDISTEIYQAGSTPCNGVEGFNCYFPLQSYGFQPTNGVGYQPYRVVVLSFELLHAPATVCGPKKSTNLVKNKCVNFNFNGLTGTGVLTESNKKFLPFQQFGRDIADTTDAVRDPQTLEILDITPCSFGGVSVITPGTNTSNQVAVLYQDVNCTEVPVAIHADQLTPTWRVYSTGSNVFQTRAGCLIGAEHVNNSYECDIPIGAGICASYQTQTNSPGSASSVASQSIIAYTMSLGAENSVAYSNNSIAIPTNFTISVTTEILPVSMTKTSVDCTMYICGDSTECSNLLLQYGSFCTQLNRALTGIAVEQDKNTQEVFAQVKQIYKTPPIKDFGGFNFSQILPDPSKPSKRSFIEDLLFNKVTLADAGFIKQYGDCLGDIAARDLICAQKFNGLTVLPPLLTDEMIAQYTSALLAGTITSGWTFGAGAALQIPFAMQMAYRFNGIGVTQNVLYENQKLIANQFNSAIGKIQDSLSSTASALGKLQDVVNQNAQALNTLVKQLSSNFGAISSVLNDILSRLDPPEAEVQIDRLITGRLQSLQTYVTQQLIRAAEIRASANLAATKMSECVLGQSKRVDFCGKGYHLMSFPQSAPHGVVFLHVTYVPAQEKNFTTAPAICHDGKAHFPREGVFVSNGTHWFVTQRNFYEPQIITTDNTFVSGNCDVVIGIVNNTVYDPLQSELDSIKEELDKIHKNGSGGSGDIIKLLNEQVNKEMQSSNLYMSMSSWCYTHSLDGAGLFLFDHAAEEYEHAKKLIIFLNENNVPVQLTSISAPEHKFEGLTQIFQKAYEHEQHISESINNIVDHAIKSKDHATFNFLQWYVAEQHEEEVLFKDILDKIELIGNENHGLYLADQYVKGIAKSRKSGS

SEQ ID NO: 291 - protein, 1318 aa, Artificial Sequence
  Description of Artificial Sequence: Synthetic polypeptide
SSQCVNLTTRTQLPPAYTNSFTRGVYYPDKVFRSSVLHSTQDLFLPFFSNVTWFHAIHVSGTNGTKRFDNPVLPFNDGVYFASTEKSNIIRGWIFGTTLDSKTQSLLIVNNATNVVIKVCEFQFCNDPFLGVYYHKNNKSWMESEFRVYSSANQCTFEYVSQPFLMDLEGKQGNFKNLREFVFKNIDGYFKIYSKHTPINLVRDLPQGFSALEPLVDLPIGINITRFQTLLALHRSYLTPGDSSSGWTAGAAAYYVGYLQPRTFLLKYNENGTITDAVDCALDPLSETKCTLKSFTVEKGIYQTSNFRVQPTESIVRFPNITNLCPFGEVFNATRFASVYAWNRKRISNCVADYSVLYNSASFSTFKCYGVSPTKLNDLCFTNVYADSFVIRGDEVRQIAPGQTGKIADYNYKLPDDFTGCVIAWNSNNLDSKVGGNYNYLYRLFRKSNLKPFERDISTEIYQAGSTPCNGVEGFNCYFPLQSYGFQPTNGVGYQPYRVVVLSFELLHAPATVCGPKKSTNLVKNKCVNFNFNGLTGTGVLTESNKKFLPFQQFGRDIADTTDAVRDPQTLEILDITPCSFGGVSVITPGTNTSNQVAVLYQGVNCTEVPVAIHADQLTPTWRVYSTGSNVFQTRAGCLIGAEHVNNSYECDIPIGAGICASYQTQTNSPGSASSVASQSIIAYTMSLGAENSVAYSNNSIAIPTNFTISVTTEILPVSMTKTSVDCTMYICGDSTECSNLLLQYGSFCTQLNRALTGIAVEQDKNTQEVFAQVKQIYKTPPIKDFGGFNFSQILPDPSKPSKRSPIEDLLFNKVTLADAGFIKQYGDCLGDIAARDLICAQKFNGLTVLPPLLTDEMIAQYTSALLAGTITSGWTFGAGPALQIPFPMQMAYRFNGIGVTQNVLYENQKLIANQFNSAIGKIQDSLSSTPSALGKLQDVVNQNAQALNTLVKQLSSNFGAISSVLNDILSRLDPPEAEVQIDRLITGRLQSLQTYVTQQLIRAAEIRASANLAATKMSECVLGQSKRVDFCGKGYHLMSFPQSAPHGVVFLHVTYVPAQEKNFTTAPAICHDGKAHFPREGVFVSNGTHWFVTQRNFYEPQIITTDNTFVSGNCDVVIGIVNNTVYDPLQSELDSIKEELDKIHKNGSGGSGDIIKLLNEQVNKEMQSSNLYMSMSSWCYTHSLDGAGLFLFDHAAEEYEHAKKLIIFLNENNVPVQLTSISAPEHKFEGLTQIFQKAYEHEQHISESINNIVDHAIKSKDHATFNFLQWYVAEQHEEEVLFKDILDKIELIGNENHGLYLADQYVKGIAKSRKSGS

SEQ ID NO: 292 - protein, 1318 aa, Artificial Sequence
  Description of Artificial Sequence: Synthetic polypeptide
SSQCVNLTTRTQLPPAYTNSFTRGVYYPDKVFRSSVLHSTQDLFLPFFSNVTWFHAIHVSGTNGTKRFDNPVLPFNDGVYFASTEKSNIIRGWIFGTTLDSKTQSLLIVNNATNVVIKVCEFQFCNDPFLGVYYHKNNKSWMESEFRVYSSANNCTFEYVSQPFLMDLEGKQGNFKNLREFVFKNIDGYFKIYSKHTPINLVRDLPQGFSALEPLVDLPIGIQITRFQTLLALHRSYLTPGDSSSGWTAGAAAYYVGYLQPRTFLLKYNENGTITDAVDCALDPLSETKCTLKSFTVEKGIYQTSNFRVQPTESIVRFPNITNLCPFGEVFNATRFASVYAWNRKRISNCVADYSVLYNSASFSTFKCYGVSPTKLNDLCFTNVYADSFVIRGDEVRQIAPGQTGKIADYNYKLPDDFTGCVIAWNSNNLDSKVGGNYNYLYRLFRKSNLKPFERDISTEIYQAGSTPCNGVEGFNCYFPLQSYGFQPTNGVGYQPYRVVVLSFELLHAPATVCGPKKSTNLVKNKCVNFNFNGLTGTGVLTESNKKFLPFQQFGRDIADTTDAVRDPQTLEILDITPCSFGGVSVITPGTNTSNQVAVLYQGVNCTEVPVAIHADQLTPTWRVYSTGSNVFQTRAGCLIGAEHVNNSYECDIPIGAGICASYQTQTNSPGSASSVASQSIIAYTMSLGAENSVAYSNNSIAIPTNFTISVTTEILPVSMTKTSVDCTMYICGDSTECSNLLLQYGSFCTQLNRALTGIAVEQDKNTQEVFAQVKQIYKTPPIKDFGGFNFSQILPDPSKPSKRSPIEDLLFNKVTLADAGFIKQYGDCLGDIAARDLICAQKFNGLTVLPPLLTDEMIAQYTSALLAGTITSGWTFGAGPALQIPFPMQMAYRFNGIGVTQNVLYENQKLIANQFNSAIGKIQDSLSSTPSALGKLQDVVNQNAQALNTLVKQLSSNFGAISSVLNDILSRLDPPEAEVQIDRLITGRLQSLQTYVTQQLIRAAEIRASANLAATKMSECVLGQSKRVDFCGKGYHLMSFPQSAPHGVVFLHVTYVPAQEKNFTTAPAICHDGKAHFPREGVFVSNGTHWFVTQRNFYEPQIITTDNTFVSGNCDVVIGIVNNTVYDPLQSELDSIKEELDKIHKNGSGGSGDIIKLLNEQVNKEMQSSNLYMSMSSWCYTHSLDGAGLFLFDHAAEEYEHAKKLIIFLNENNVPVQLTSISAPEHKFEGLTQIFQKAYEHEQHISESINNIVDHAIKSKDHATFNFLQWYVAEQHEEEVLFKDILDKIELIGNENHGLYLADQYVKGIAKSRKSGS

SEQ ID NO: 293 - protein, 1332 aa, Artificial Sequence
  Description of Artificial Sequence: Synthetic polypeptide
SSQCVNLTTRTQLPPAYTNSFTRGVYYPDKVFRSSVLHSTQDLFLPFFSNVTWFHAIHVSGTNGTKRFDNPVLPFNDGVYFASTEKSNIIRGWIFGTTLDSKTQSLLIVNNATNVVIKVCEFQFCNDPFLGVYYHKNNKSWMESEFRVYSSANQCTFEYVSQPFLMDLEGKQGNFKNLREFVFKNIDGYFKIYSKHTPINLVRDLPQGFSALEPLVDLPIGINITRFQTLLALHRSYLTPGDSSSGWTAGAAAYYVGYLQPRTFLLKYNENGTITDAVDCALDPLSETKCTLKSFTVEKGIYQTSNFRVQPTESIVRFPNITNLCPFGEVFNATRFASVYAWNRKRISNCVADYSVLYNSASFSTFKCYGVSPTKLNDLCFTNVYADSFVIRGDEVRQIAPGQTGKIADYNYKLPDDFTGCVIAWNSNNLDSKVGGNYNYLYRLFRKSNLKPFERDISTEIYQAGSTPCNGVEGFNCYFPLQSYGFQPTNGVGYQPYRVVVLSFELLHAPATVCGPKKSTNLVKNKCVNFNFNGLTGTGVLTESNKKFLPFQQFGRDIADTTDAVRDPQTLEILDITPCSFGGVSVITPGTNTSNQVAVLYQGVNCTEVPVAIHADQLTPTWRVYSTGSNVFQTRAGCLIGAEHVNNSYECDIPIGAGICASYQTQTNSPGSASSVASQSIIAYTMSLGAENSVAYSNNSIAIPTNFTISVTTEILPVSMTKTSVDCTMYICGDSTECSNLLLQYGSFCTQLNRALTGIAVEQDKNTQEVFAQVKQIYKTPPIKDFGGFNFSQILPDPSKPSKRSPIEDLLFNKVTLADAGFIKQYGDCLGDIAARDLICAQKFNGLTVLPPLLTDEMIAQYTSALLAGTITSGWTFGAGPALQIPFPMQMAYRFNGIGVTQNVLYENQKLIANQFNSAIGKIQDSLSSTPSALGKLQDVVNQNAQALNTLVKQLSSNFGAISSVLNDILSRLDPPEAEVQIDRLITGRLQSLQTYVTQQLIRAAEIRASANLAATKMSECVLGQSKRVDFCGKGYHLMSFPQSAPHGVVFLHVTYVPAQEKNFTTAPAICHDGKAHFPREGVFVSNGTHWFVTQRNFYEPQIITTDNTFVSGNCDVVIGIVNNTVYDPLQSELDSIKEELDKIHKNLDSIKEELDKIHKNGSGGSGDIIKLLNEQVNKEMQSSNLYMSMSSWCYTHSLDGAGLFLFDHAAEEYEHAKKLIIFLNENNVPVQLTSISAPEHKFEGLTQIFQKAYEHEQHISESINNIVDHAIKSKDHATFNFLQWYVAEQHEEEVLFKDILDKIELIGNENHGLYLADQYVKGIAKSRKSGS

SEQ ID NO: 294 - protein, 1332 aa, Artificial Sequence
  Description of Artificial Sequence: Synthetic polypeptide
SSQCVNLTTRTQLPPAYTNSFTRGVYYPDKVFRSSVLHSTQDLFLPFFSNVTWFHAIHVSGTNGTKRFDNPVLPFNDGVYFASTEKSNIIRGWIFGTTLDSKTQSLLIVNNATNVVIKVCEFQFCNDPFLGVYYHKNNKSWMESEFRVYSSANNCTFEYVSQPFLMDLEGKQGNFKNLREFVFKNIDGYFKIYSKHTPINLVRDLPQGFSALEPLVDLPIGIQITRFQTLLALHRSYLTPGDSSSGWTAGAAAYYVGYLQPRTFLLKYNENGTITDAVDCALDPLSETKCTLKSFTVEKGIYQTSNFRVQPTESIVRFPNITNLCPFGEVFNATRFASVYAWNRKRISNCVADYSVLYNSASFSTFKCYGVSPTKLNDLCFTNVYADSFVIRGDEVRQIAPGQTGKIADYNYKLPDDFTGCVIAWNSNNLDSKVGGNYNYLYRLFRKSNLKPFERDISTEIYQAGSTPCNGVEGFNCYFPLQSYGFQPTNGVGYQPYRVVVLSFELLHAPATVCGPKKSTNLVKNKCVNFNFNGLTGTGVLTESNKKFLPFQQFGRDIADTTDAVRDPQTLEILDITPCSFGGVSVITPGTNTSNQVAVLYQGVNCTEVPVAIHADQLTPTWRVYSTGSNVFQTRAGCLIGAEHVNNSYECDIPIGAGICASYQTQTNSPGSASSVASQSIIAYTMSLGAENSVAYSNNSIAIPTNFTISVTTEILPVSMTKTSVDCTMYICGDSTECSNLLLQYGSFCTQLNRALTGIAVEQDKNTQEVFAQVKQIYKTPPIKDFGGFNFSQILPDPSKPSKRSPIEDLLFNKVTLADAGFIKQYGDCLGDIAARDLICAQKFNGLTVLPPLLTDEMIAQYTSALLAGTITSGWTFGAGPALQIPFPMQMAYRFNGIGVTQNVLYENQKLIANQFNSAIGKIQDSLSSTPSALGKLQDVVNQNAQALNTLVKQLSSNFGAISSVLNDILSRLDPPEAEVQIDRLITGRLQSLQTYVTQQLIRAAEIRASANLAATKMSECVLGQSKRVDFCGKGYHLMSFPQSAPHGVVFLHVTYVPAQEKNFTTAPAICHDGKAHFPREGVFVSNGTHWFVTQRNFYEPQIITTDNTFVSGNCDVVIGIVNNTVYDPLQSELDSIKEELDKIHKNLDSIKEELDKIHKNGSGGSGDIIKLLNEQVNKEMQSSNLYMSMSSWCYTHSLDGAGLFLFDHAAEEYEHAKKLIIFLNENNVPVQLTSISAPEHKFEGLTQIFQKAYEHEQHISESINNIVDHAIKSKDHATFNFLQWYVAEQHEEEVLFKDILDKIELIGNENHGLYLADQYVKGIAKSRKSGS

SEQ ID NO: 295 - protein, 1318 aa, Artificial Sequence
  Description of Artificial Sequence: Synthetic polypeptide
SSQCVNLTTRTQLPPAYTNSFTRGVYYPDKVFRSSVLHSTQDLFLPFFSNVTWFHAIHVSGTNGTKRFDNPVLPFNDGVYFASTEKSNIIRGWIFGTTLDSKTQSLLIVNNATNVVIKVCEFQFCNDPFLGVYYHKNNKSWMESEFRVYSSANNCTFEYVSQPFLMDLEGKQGNFKNLREFVFKNIDGYFKIYSKHTPINLVRDLPQGFSALEPLVDLPIGINITRFQTLLALHRSYLTPGDSSSGWTAGAAAYYVGYLQPRTFLLKYNENGTITDAVDCALDPLSETKCTLKSFTVEKGIYQTSNFRVQPTESIVRFPNITNLCPFGEVFNATRFASVYAWNRKRISNCVADYSVLYNSASFSTFKCYGVSPTKLNDLCFTNVYADSFVIRGDEVRQIAPGQTGKIADYNYKLPDDFTGCVIAWNSNNLDSKVGGNYNYLYRLFRKSNLKPFERDISTEIYQAGSTPCNGVEGFNCYFPLQSYGFQPTNGVGYQPYRVVVLSFELLHAPATVCGPKKSTNLVKNKCVNFNFNGLTGTGVLTESNKKFLPFQQFGRDIADTTDAVRDPQTLEILDITPCSFGGVSVITPGTNTSNQVAVLYQDVNCTEVPVAIHADQLTPTWRVYSTGSNVFQTRAGCLIGAEHVNNSYECDIPIGAGICASYQTQTNSPGSASSVASQSIIAYTMSLGAENSVAYSNNSIAIPTNFTISVTTEILPVSMTKTSVDCTMYICGDSTECSNLLLQYGSFCTQLNRALTGIAVEQDKNTQEVFAQVKQIYKTPPIKDFGGFNFSQILPDPSKPSKRSFIEDLLFNKVTLADAGFIKQYGDCLGDIAARDLICAQKFNGLTVLPPLLTDEMIAQYTSALLAGTITSGWTFGAGAALQIPFAMQMAYRFNGIGVTQNVLYENQKLIANQFNSAIGKIQDSLSSTASALGKLQDVVNQNAQALNTLVKQLSSNFGAISSVLNDILSRLDPPEAEVQIDRLITGRLQSLQTYVTQQLIRAAEIRASANLAATKMSECVLGQSKRVDFCGKGYHLMSFPQSAPHGVVFLHVTYVPAQEKNFTTAPAICHDGKAHFPREGVFVSNGTHWFVTQRNFYEPQIITTDNTFVSGNCDVVIGIVNNTVYDPLQSELDSIKEELDKIHKNGSGGSGDIIKLLNEQVNKEMQSSNLYMSMSSWCYTHSLDGAGLFLFDHAAEEYEHAKKLIIFLNENNVPVQLTSISAPEHKFEGLTQIFQKAYEHEQHISESINNIVDHAIKSKDHATFNFLQWYVAEQHEEEVLFKDILDKIELIGNETHGLYLADQYVKGIAKSRKSGS

SEQ ID NO: 296 - protein, 1318 aa, Artificial Sequence
  Description of Artificial Sequence: Synthetic polypeptide
SSQCVNLTTRTQLPPAYTNSFTRGVYYPDKVFRSSVLHSTQDLFLPFFSNVTWFHAIHVSGTNGTKRFDNPVLPFNDGVYFASTEKSNIIRGWIFGTTLDSKTQSLLIVNNATNVVIKVCEFQFCNDPFLGVYYHKNNKSWMESEFRVYSSANNCTFEYVSQPFLMDLEGKQGNFKNLREFVFKNIDGYFKIYSKHTPINLVRDLPQGFSALEPLVDLPIGINITRFQTLLALHRSYLTPGDSSSGWTAGAAAYYVGYLQPRTFLLKYNENGTITDAVDCALDPLSETKCTLKSFTVEKGIYQTSNFRVQPTESIVRFPNITNLCPFGEVFNATRFASVYAWNRKRISNCVADYSVLYNSASFSTFKCYGVSPTKLNDLCFTNVYADSFVIRGDEVRQIAPGQTGKIADYNYKLPDDFTGCVIAWNSNNLDSKVGGNYNYLYRLFRKSNLKPFERDISTEIYQAGSTPCNGVEGFNCYFPLQSYGFQPTNGVGYQPYRVVVLSFELLHAPATVCGPKKSTNLVKNKCVNFNFNGLTGTGVLTESNKKFLPFQQFGRDIADTTDAVRDPQTLEILDITPCSFGGVSVITPGTNTSNQVAVLYQDVNCTEVPVAIHADQLTPTWRVYSTGSNVFQTRAGCLIGAEHVNNSYECDIPIGAGICASYQTQTNSPGSASSVASQSIIAYTMSLGAENSVAYSNNSIAIPTNFTISVTTEILPVSMTKTSVDCTMYICGDSTECSNLLLQYGSFCTQLNRALTGIAVEQDKNTQEVFAQVKQIYKTPPIKDFGGFNFSQILPDPSKPSKRSFIEDLLFNKVTLADAGFIKQYGDCLGDIAARDLICAQKFNGLTVLPPLLTDEMIAQYTSALLAGTITSGWTFGAGAALQIPFAMQMAYRFNGIGVTQNVLYENQKLIANQFNSAIGKIQDSLSSTASALGKLQDVVNQNAQALNTLVKQLSSNFGAISSVLNDILSRLDPPEAEVQIDRLITGRLQSLQTYVTQQLIRAAEIRASANLAATKMSECVLGQSKRVDFCGKGYHLMSFPQSAPHGVVFLHVTYVPAQEKNFTTAPAICHDGKAHFPREGVFVSNGTHWFVTQRNFYEPQIITTDNTFVSGNCDVVIGIVNNTVYDPLQSELDSIKEELDKIHKNGSGGSGDIIKLLNEQVNKEMQSSNLYMSMSSWCYTHSLDGAGLFLFDHAAEEYEHAKKLIIFLNENNVPVQLTSISAPNHSFEGLTQIFQKAYEHEQHISESINNIVDHAIKSKDHATFNFLQWYVAEQHEEEVLFKDILDKIELIGNENHGLYLADQYVKGIAKSRKSGS

SEQ ID NO: 297 - protein, 1318 aa, Artificial Sequence
  Description of Artificial Sequence: Synthetic polypeptide
SSQCVNLTTRTQLPPAYTNSFTRGVYYPDKVFRSSVLHSTQDLFLPFFSNVTWFHAIHVSGTNGTKRFDNPVLPFNDGVYFASTEKSNIIRGWIFGTTLDSKTQSLLIVNNATNVVIKVCEFQFCNDPFLGVYYHKNNKSWMESEFRVYSSANNCTFEYVSQPFLMDLEGKQGNFKNLREFVFKNIDGYFKIYSKHTPINLVRDLPQGFSALEPLVDLPIGINITRFQTLLALHRSYLTPGDSSSGWTAGAAAYYVGYLQPRTFLLKYNENGTITDAVDCALDPLSETKCTLKSFTVEKGIYQTSNFRVQPTESIVRFPNITNLCPFGEVFNATRFASVYAWNRKRISNCVADYSVLYNSASFSTFKCYGVSPTKLNDLCFTNVYADSFVIRGDEVRQIAPGQTGKIADYNYKLPDDFTGCVIAWNSNNLDSKVGGNYNYLYRLFRKSNLKPFERDISTEIYQAGSTPCNGVEGFNCYFPLQSYGFQPTNGVGYQPYRVVVLSFELLHAPATVCGPKKSTNLVKNKCVNFNFNGLTGTGVLTESNKKFLPFQQFGRDIADTTDAVRDPQTLEILDITPCSFGGVSVITPGTNTSNQVAVLYQGVNCTEVPVAIHADQLTPTWRVYSTGSNVFQTRAGCLIGAEHVNNSYECDIPIGAGICASYQTQTNSPGSASSVASQSIIAYTMSLGAENSVAYSNNSIAIPTNFTISVTTEILPVSMTKTSVDCTMYICGDSTECSNLLLQYGSFCTQLNRALTGIAVEQDKNTQEVFAQVKQIYKTPPIKDFGGFNFSQILPDPSKPSKRSPIEDLLFNKVTLADAGFIKQYGDCLGDIAARDLICAQKFNGLTVLPPLLTDEMIAQYTSALLAGTITSGWTFGAGPALQIPFPMQMAYRFNGIGVTQNVLYENQKLIANQFNSAIGKIQDSLSSTPSALGKLQDVVNQNAQALNTLVKQLSSNFGAISSVLNDILSRLDPPEAEVQIDRLITGRLQSLQTYVTQQLIRAAEIRASANLAATKMSECVLGQSKRVDFCGKGYHLMSFPQSAPHGVVFLHVTYVPAQEKNFTTAPAICHDGKAHFPREGVFVSNGTHWFVTQRNFYEPQIITTDNTFVSGNCDVVIGIVNNTVYDPLQSELDSIKEELDKIHKNGSGGSGDIIKLLNEQVNKEMQSSNLYMSMSSWCYTHSLDGAGLFLFDHAAEEYEHAKKLIIFLNENNVPVQLTSISAPEHKFEGLTQIFQKAYEHEQHISESINNIVDHAIKSKDHATFNFLQWYVAEQHEEEVLFKDILDKIELIGNETHGLYLADQYVKGIAKSRKSGS

SEQ ID NO: 298 - protein, 1318 aa, Artificial Sequence
  Description of Artificial Sequence: Synthetic polypeptide
SSQCVNLTTRTQLPPAYTNSFTRGVYYPDKVFRSSVLHSTQDLFLPFFSNVTWFHAIHVSGTNGTKRFDNPVLPFNDGVYFASTEKSNIIRGWIFGTTLDSKTQSLLIVNNATNVVIKVCEFQFCNDPFLGVYYHKNNKSWMESEFRVYSSANNCTFEYVSQPFLMDLEGKQGNFKNLREFVFKNIDGYFKIYSKHTPINLVRDLPQGFSALEPLVDLPIGINITRFQTLLALHRSYLTPGDSSSGWTAGAAAYYVGYLQPRTFLLKYNENGTITDAVDCALDPLSETKCTLKSFTVEKGIYQTSNFRVQPTESIVRFPNITNLCPFGEVFNATRFASVYAWNRKRISNCVADYSVLYNSASFSTFKCYGVSPTKLNDLCFTNVYADSFVIRGDEVRQIAPGQTGKIADYNYKLPDDFTGCVIAWNSNNLDSKVGGNYNYLYRLFRKSNLKPFERDISTEIYQAGSTPCNGVEGFNCYFPLQSYGFQPTNGVGYQPYRVVVLSFELLHAPATVCGPKKSTNLVKNKCVNFNFNGLTGTGVLTESNKKFLPFQQFGRDIADTTDAVRDPQTLEILDITPCSFGGVSVITPGTNTSNQVAVLYQGVNCTEVPVAIHADQLTPTWRVYSTGSNVFQTRAGCLIGAEHVNNSYECDIPIGAGICASYQTQTNSPGSASSVASQSIIAYTMSLGAENSVAYSNNSIAIPTNFTISVTTEILPVSMTKTSVDCTMYICGDSTECSNLLLQYGSFCTQLNRALTGIAVEQDKNTQEVFAQVKQIYKTPPIKDFGGFNFSQILPDPSKPSKRSPIEDLLFNKVTLADAGFIKQYGDCLGDIAARDLICAQKFNGLTVLPPLLTDEMIAQYTSALLAGTITSGWTFGAGPALQIPFPMQMAYRFNGIGVTQNVLYENQKLIANQFNSAIGKIQDSLSSTPSALGKLQDVVNQNAQALNTLVKQLSSNFGAISSVLNDILSRLDPPEAEVQIDRLITGRLQSLQTYVTQQLIRAAEIRASANLAATKMSECVLGQSKRVDFCGKGYHLMSFPQSAPHGVVFLHVTYVPAQEKNFTTAPAICHDGKAHFPREGVFVSNGTHWFVTQRNFYEPQIITTDNTFVSGNCDVVIGIVNNTVYDPLQSELDSIKEELDKIHKNGSGGSGDIIKLLNEQVNKEMQSSNLYMSMSSWCYTHSLDGAGLFLFDHAAEEYEHAKKLIIFLNENNVPVQLTSISAPNHSFEGLTQIFQKAYEHEQHISESINNIVDHAIKSKDHATFNFLQWYVAEQHEEEVLFKDILDKIELIGNENHGLYLADQYVKGIAKSRKSGS

SEQ ID NO: 299 - protein, 1332 aa, Artificial Sequence
  Description of Artificial Sequence: Synthetic polypeptide
SSQCVNLTTRTQLPPAYTNSFTRGVYYPDKVFRSSVLHSTQDLFLPFFSNVTWFHAIHVSGTNGTKRFDNPVLPFNDGVYFASTEKSNIIRGWIFGTTLDSKTQSLLIVNNATNVVIKVCEFQFCNDPFLGVYYHKNNKSWMESEFRVYSSANNCTFEYVSQPFLMDLEGKQGNFKNLREFVFKNIDGYFKIYSKHTPINLVRDLPQGFSALEPLVDLPIGINITRFQTLLALHRSYLTPGDSSSGWTAGAAAYYVGYLQPRTFLLKYNENGTITDAVDCALDPLSETKCTLKSFTVEKGIYQTSNFRVQPTESIVRFPNITNLCPFGEVFNATRFASVYAWNRKRISNCVADYSVLYNSASFSTFKCYGVSPTKLNDLCFTNVYADSFVIRGDEVRQIAPGQTGKIADYNYKLPDDFTGCVIAWNSNNLDSKVGGNYNYLYRLFRKSNLKPFERDISTEIYQAGSTPCNGVEGFNCYFPLQSYGFQPTNGVGYQPYRVVVLSFELLHAPATVCGPKKSTNLVKNKCVNFNFNGLTGTGVLTESNKKFLPFQQFGRDIADTTDAVRDPQTLEILDITPCSFGGVSVITPGTNTSNQVAVLYQGVNCTEVPVAIHADQLTPTWRVYSTGSNVFQTRAGCLIGAEHVNNSYECDIPIGAGICASYQTQTNSPGSASSVASQSIIAYTMSLGAENSVAYSNNSIAIPTNFTISVTTEILPVSMTKTSVDCTMYICGDSTECSNLLLQYGSFCTQLNRALTGIAVEQDKNTQEVFAQVKQIYKTPPIKDFGGFNFSQILPDPSKPSKRSPIEDLLFNKVTLADAGFIKQYGDCLGDIAARDLICAQKFNGLTVLPPLLTDEMIAQYTSALLAGTITSGWTFGAGPALQIPFPMQMAYRFNGIGVTQNVLYENQKLIANQFNSAIGKIQDSLSSTPSALGKLQDVVNQNAQALNTLVKQLSSNFGAISSVLNDILSRLDPPEAEVQIDRLITGRLQSLQTYVTQQLIRAAEIRASANLAATKMSECVLGQSKRVDFCGKGYHLMSFPQSAPHGVVFLHVTYVPAQEKNFTTAPAICHDGKAHFPREGVFVSNGTHWFVTQRNFYEPQIITTDNTFVSGNCDVVIGIVNNTVYDPLQSELDSIKEELDKIHKNLDSIKEELDKIHKNGSGGSGDIIKLLNEQVNKEMQSSNLYMSMSSWCYTHSLDGAGLFLFDHAAEEYEHAKKLIIFLNENNVPVQLTSISAPEHKFEGLTQIFQKAYEHEQHISESINNIVDHAIKSKDHATFNFLQWYVAEQHEEEVLFKDILDKIELIGNETHGLYLADQYVKGIAKSRKSGS

SEQ ID NO: 300 - protein, 1332 aa, Artificial Sequence
  Description of Artificial Sequence: Synthetic polypeptide
SSQCVNLTTRTQLPPAYTNSFTRGVYYPDKVFRSSVLHSTQDLFLPFFSNVTWFHAIHVSGTNGTKRFDNPVLPFNDGVYFASTEKSNIIRGWIFGTTLDSKTQSLLIVNNATNVVIKVCEFQFCNDPFLGVYYHKNNKSWMESEFRVYSSANNCTFEYVSQPFLMDLEGKQGNFKNLREFVFKNIDGYFKIYSKHTPINLVRDLPQGFSALEPLVDLPIGINITRFQTLLALHRSYLTPGDSSSGWTAGAAAYYVGYLQPRTFLLKYNENGTITDAVDCALDPLSETKCTLKSFTVEKGIYQTSNFRVQPTESIVRFPNITNLCPFGEVFNATRFASVYAWNRKRISNCVADYSVLYNSASFSTFKCYGVSPTKLNDLCFTNVYADSFVIRGDEVRQIAPGQTGKIADYNYKLPDDFTGCVIAWNSNNLDSKVGGNYNYLYRLFRKSNLKPFERDISTEIYQAGSTPCNGVEGFNCYFPLQSYGFQPTNGVGYQPYRVVVLSFELLHAPATVCGPKKSTNLVKNKCVNFNFNGLTGTGVLTESNKKFLPFQQFGRDIADTTDAVRDPQTLEILDITPCSFGGVSVITPGTNTSNQVAVLYQGVNCTEVPVAIHADQLTPTWRVYSTGSNVFQTRAGCLIGAEHVNNSYECDIPIGAGICASYQTQTNSPGSASSVASQSIIAYTMSLGAENSVAYSNNSIAIPTNFTISVTTEILPVSMTKTSVDCTMYICGDSTECSNLLLQYGSFCTQLNRALTGIAVEQDKNTQEVFAQVKQIYKTPPIKDFGGFNFSQILPDPSKPSKRSPIEDLLFNKVTLADAGFIKQYGDCLGDIAARDLICAQKFNGLTVLPPLLTDEMIAQYTSALLAGTITSGWTFGAGPALQIPFPMQMAYRFNGIGVTQNVLYENQKLIANQFNSAIGKIQDSLSSTPSALGKLQDVVNQNAQALNTLVKQLSSNFGAISSVLNDILSRLDPPEAEVQIDRLITGRLQSLQTYVTQQLIRAAEIRASANLAATKMSECVLGQSKRVDFCGKGYHLMSFPQSAPHGVVFLHVTYVPAQEKNFTTAPAICHDGKAHFPREGVFVSNGTHWFVTQRNFYEPQIITTDNTFVSGNCDVVIGIVNNTVYDPLQSELDSIKEELDKIHKNLDSIKEELDKIHKNGSGGSGDIIKLLNEQVNKEMQSSNLYMSMSSWCYTHSLDGAGLFLFDHAAEEYEHAKKLIIFLNENNVPVQLTSISAPNHSFEGLTQIFQKAYEHEQHISESINNIVDHAIKSKDHATFNFLQWYVAEQHEEEVLFKDILDKIELIGNENHGLYLADQYVKGIAKSRKSGS

SEQ ID NO: 301 - protein, 1336 aa, Artificial Sequence
  Description of Artificial Sequence: Synthetic polypeptide
HHHHHHHHGPLEVLFQGPSSQCVNLTTRTQLPPAYTNSFTRGVYYPDKVFRSSVLHSTQDLFLPFFSNVTWFHAIHVSGTNGTKRFDNPVLPFNDGVYFASTEKSNIIRGWIFGTTLDSKTQSLLIVNNATNVVIKVCEFQFCNDPFLGVYYHKNNKSWMESEFRVYSSANNCTFEYVSQPFLMDLEGKQGNFKNLREFVFKNIDGYFKIYSKHTPINLVRDLPQGFSALEPLVDLPIGINITRFQTLLALHRSYLTPGDSSSGWTAGAAAYYVGYLQPRTFLLKYNENGTITDAVDCALDPLSETKCTLKSFTVEKGIYQTSNFRVQPTESIVRFPNITNLCPFGEVFNATRFASVYAWNRKRISNCVADYSVLYNSASFSTFKCYGVSPTKLNDLCFTNVYADSFVIRGDEVRQIAPGQTGKIADYNYKLPDDFTGCVIAWNSNNLDSKVGGNYNYLYRLFRKSNLKPFERDISTEIYQAGSTPCNGVEGFNCYFPLQSYGFQPTNGVGYQPYRVVVLSFELLHAPATVCGPKKSTNLVKNKCVNFNFNGLTGTGVLTESNKKFLPFQQFGRDIADTTDAVRDPQTLEILDITPCSFGGVSVITPGTNTSNQVAVLYQDVNCTEVPVAIHADQLTPTWRVYSTGSNVFQTRAGCLIGAEHVNNSYECDIPIGAGICASYQTQTNSPGSASSVASQSIIAYTMSLGAENSVAYSNNSIAIPTNFTISVTTEILPVSMTKTSVDCTMYICGDSTECSNLLLQYGSFCTQLNRALTGIAVEQDKNTQEVFAQVKQIYKTPPIKDFGGFNFSQILPDPSKPSKRSFIEDLLFNKVTLADAGFIKQYGDCLGDIAARDLICAQKFNGLTVLPPLLTDEMIAQYTSALLAGTITSGWTFGAGAALQIPFAMQMAYRFNGIGVTQNVLYENQKLIANQFNSAIGKIQDSLSSTASALGKLQDVVNQNAQALNTLVKQLSSNFGAISSVLNDILSRLDPPEAEVQIDRLITGRLQSLQTYVTQQLIRAAEIRASANLAATKMSECVLGQSKRVDFCGKGYHLMSFPQSAPHGVVFLHVTYVPAQEKNFTTAPAICHDGKAHFPREGVFVSNGTHWFVTQRNFYEPQIITTDNTFVSGNCDVVIGIVNNTVYDPLQSELDSIKEELDKIHKNGSGGSGDIIKLLNEQVNKEMQSSNLYMSMSSWCYTHSLDGAGLFLFDHAAEEYEHAKKLIIFLNENNVPVQLTSISAPEHKFEGLTQIFQKAYEHEQHISESINNIVDHAIKSKDHATFNFLQWYVAEQHEEEVLFKDILDKIELIGNENHGLYLADQYVKGIAKSRKSGS

SEQ ID NO: 302 - protein, 1216 aa, Artificial Sequence
  Description of Artificial Sequence: Synthetic polypeptide
NITNLCPFGEVFNATRFASVYAWNRKRISNCVADYSVLYNSASFSTFKCYGVSPTKLNDLCFTNVYADSFVIRGDEVRQIAPGQTGKIADYNYKLPDDFTGCVIAWNSNNLDSKVGGNYNYLYRLFRKSNLKPFERDISTEIYQAGSTPCNGVEGFNCYFPLQSYGFQPTNGVGYQPYRVVVLSFELLHAPATVCGGGGSTNLCPFGEVFNATKFPSVYAWERKKISNCVADYSVLYNSTFFSTFKCYGVSATKLNDLCFSNVYADSFVVKGDDVRQIAPGQTGVIADYNYKLPDDFMGCVLAWNTRNIDATSTGNYNYKYRYLRHGKLRPFERDISNVPFSPDGKPCTPPALNCYWPLNDYGFYTTTGIGYQPCGGGGSDCDIDKWLNNFNVPSPLNWERKIFSNCNFNLSTLLRLVHTDSFSCNNFDESKIYGSCFKSIVLDKFAIPNSRRSDLQLGSSGFLQSSNYKIDTTSSSCQLYYSLPAINVTINNYNPSSWNRRYGFNNFNLSSHSVVYSRYCFSVNNTFCPCAKPSFASSCKSHKPPSASCPIGTNYRSCESTTVLDHTDWCRCSCLPDPITAYDPRSCSQKKSLVGVGEHCAGFGVDEEKCGVLDGSYNVSCLCSTDAFLGWSYDTCVSNNRCNIFSNFILNGCGGGGSEAKPSGSVVEQAEGVECDFSPLLSGTPPQVYNFKRLVFTNCNYNLTKLLSLFSVNDFTCSQISPAAIASNCYSSLILDYFSYPLSMKSDLSVSSAGPISQFNYKQSFSNPTCLILATVPHNLTTITKPLKYSYINKCSRFLSDDRTEVPQLVNANQYSPCVSIVPSTVWEDGDYYRKQLSPLEGGGWLVASGSTVAMTEQLQMGFGITVQYGTDTNSVCPKCGGGGSSIVSLPVYHKHTFIVLYVDFKPQSGGGKCFNCYPAGVNITLANFNETKGPLCVDTSHFTTKYVAVYANVGRWSASINTGNCPFSFGKVNNFVKFGSVCFSLKDIPGGCAMPIVANWAYSKYYTIGSLYVSWSDGDGITGVPQPVEGVSSGSGGGGESQVRQQFSKDIEKLLNEQVNKEMQSSNLYMSMSSWCYTHSLDGAGLFLFDHAAEEYEHAKKLIIFLNENNVPVQLTSISAPEHKFEGLTQIFQKAYEHEQHISESINNIVDHAIKSKDHATFNFLQWYVAEQHEEEVLFKDILDKIELIGNENHGLYLADQYVKGIAKSRKSGS

SEQ ID NO: 303 - protein, 1216 aa, Artificial Sequence
  Description of Artificial Sequence: Synthetic polypeptide
TNLCPFGEVFNATKFPSVYAWERKKISNCVADYSVLYNSTFFSTFKCYGVSATKLNDLCFSNVYADSFVVKGDDVRQIAPGQTGVIADYNYKLPDDFMGCVLAWNTRNIDATSTGNYNYKYRYLRHGKLRPFERDISNVPFSPDGKPCTPPALNCYWPLNDYGFYTTTGIGYQPCGGGGSDCDIDKWLNNFNVPSPLNWERKIFSNCNFNLSTLLRLVHTDSFSCNNFDESKIYGSCFKSIVLDKFAIPNSRRSDLQLGSSGFLQSSNYKIDTTSSSCQLYYSLPAINVTINNYNPSSWNRRYGFNNFNLSSHSVVYSRYCFSVNNTFCPCAKPSFASSCKSHKPPSASCPIGTNYRSCESTTVLDHTDWCRCSCLPDPITAYDPRSCSQKKSLVGVGEHCAGFGVDEEKCGVLDGSYNVSCLCSTDAFLGWSYDTCVSNNRCNIFSNFILNGCGGGGSEAKPSGSVVEQAEGVECDFSPLLSGTPPQVYNFKRLVFTNCNYNLTKLLSLFSVNDFTCSQISPAAIASNCYSSLILDYFSYPLSMKSDLSVSSAGPISQFNYKQSFSNPTCLILATVPHNLTTITKPLKYSYINKCSRFLSDDRTEVPQLVNANQYSPCVSIVPSTVWEDGDYYRKQLSPLEGGGWLVASGSTVAMTEQLQMGFGITVQYGTDTNSVCPKCGGGGSSIVSLPVYHKHTFIVLYVDFKPQSGGGKCFNCYPAGVNITLANFNETKGPLCVDTSHFTTKYVAVYANVGRWSASINTGNCPFSFGKVNNFVKFGSVCFSLKDIPGGCAMPIVANWAYSKYYTIGSLYVSWSDGDGITGVPQPVEGVSSNITNLCPFGEVFNATRFASVYAWNRKRISNCVADYSVLYNSASFSTFKCYGVSPTKLNDLCFTNVYADSFVIRGDEVRQIAPGQTGKIADYNYKLPDDFTGCVIAWNSNNLDSKVGGNYNYLYRLFRKSNLKPFERDISTEIYQAGSTPCNGVEGFNCYFPLQSYGFQPTNGVGYQPYRVVVLSFELLHAPATVCGGGGSGSGGGGESQVRQQFSKDIEKLLNEQVNKEMQSSNLYMSMSSWCYTHSLDGAGLFLFDHAAEEYEHAKKLIIFLNENNVPVQLTSISAPEHKFEGLTQIFQKAYEHEQHISESINNIVDHAIKSKDHATFNFLQWYVAEQHEEEVLFKDILDKIELIGNENHGLYLADQYVKGIAKSRKSGS

SEQ ID NO: 304 - protein, 937 aa, Artificial Sequence
  Description of Artificial Sequence: Synthetic polypeptide
NITNLCPFGEVFNATRFASVYAWNRKRISNCVADYSVLYNSASFSTFKCYGVSPTKLNDLCFTNVYADSFVIRGDEVRQIAPGQTGKIADYNYKLPDDFTGCVIAWNSNNLDSKVGGNYNYLYRLFRKSNLKPFERDISTEIYQAGSTPCNGVEGFNCYFPLQSYGFQPTNGVGYQPYRVVVLSFELLHAPATVCGGGGSTNLCPFGEVFNATKFPSVYAWERKKISNCVADYSVLYNSTFFSTFKCYGVSATKLNDLCFSNVYADSFVVKGDDVRQIAPGQTGVIADYNYKLPDDFMGCVLAWNTRNIDATSTGNYNYKYRYLRHGKLRPFERDISNVPFSPDGKPCTPPALNCYWPLNDYGFYTTTGIGYQPCGGGGSEAKPSGSVVEQAEGVECDFSPLLSGTPPQVYNFKRLVFTNCNYNLTKLLSLFSVNDFTCSQISPAAIASNCYSSLILDYFSYPLSMKSDLSVSSAGPISQFNYKQSFSNPTCLILATVPHNLTTITKPLKYSYINKCSRFLSDDRTEVPQLVNANQYSPCVSIVPSTVWEDGDYYRKQLSPLEGGGWLVASGSTVAMTEQLQMGFGITVQYGTDTNSVCPKCGGGGSSIVSLPVYHKHTFIVLYVDFKPQSGGGKCFNCYPAGVNITLANFNETKGPLCVDTSHFTTKYVAVYANVGRWSASINTGNCPFSFGKVNNFVKFGSVCFSLKDIPGGCAMPIVANWAYSKYYTIGSLYVSWSDGDGITGVPQPVEGVSSGSGGGGESQVRQQFSKDIEKLLNEQVNKEMQSSNLYMSMSSWCYTHSLDGAGLFLFDHAAEEYEHAKKLIIFLNENNVPVQLTSISAPEHKFEGLTQIFQKAYEHEQHISESINNIVDHAIKSKDHATFNFLQWYVAEQHEEEVLFKDILDKIELIGNENHGLYLADQYVKGIAKSRKSGS

SEQ ID NO: 305 - protein, 1036 aa, Artificial Sequence
  Description of Artificial Sequence: Synthetic polypeptide
NITNLCPFGEVFNATRFASVYAWNRKRISNCVADYSVLYNSASFSTFKCYGVSPTKLNDLCFTNVYADSFVIRGDEVRQIAPGQTGKIADYNYKLPDDFTGCVIAWNSNNLDSKVGGNYNYLYRLFRKSNLKPFERDISTEIYQAGSTPCNGVEGFNCYFPLQSYGFQPTNGVGYQPYRVVVLSFELLHAPATVCGGGGSDCDIDKWLNNFNVPSPLNWERKIFSNCNFNLSTLLRLVHTDSFSCNNFDESKIYGSCFKSIVLDKFAIPNSRRSDLQLGSSGFLQSSNYKIDTTSSSCQLYYSLPAINVTINNYNPSSWNRRYGFNNFNLSSHSVVYSRYCFSVNNTFCPCAKPSFASSCKSHKPPSASCPIGTNYRSCESTTVLDHTDWCRCSCLPDPITAYDPRSCSQKKSLVGVGEHCAGFGVDEEKCGVLDGSYNVSCLCSTDAFLGWSYDTCVSNNRCNIFSNFILNGCGGGGSEAKPSGSVVEQAEGVECDFSPLLSGTPPQVYNFKRLVFTNCNYNLTKLLSLFSVNDFTCSQISPAAIASNCYSSLILDYFSYPLSMKSDLSVSSAGPISQFNYKQSFSNPTCLILATVPHNLTTITKPLKYSYINKCSRFLSDDRTEVPQLVNANQYSPCVSIVPSTVWEDGDYYRKQLSPLEGGGWLVASGSTVAMTEQLQMGFGITVQYGTDTNSVCPKCGGGGSSIVSLPVYHKHTFIVLYVDFKPQSGGGKCFNCYPAGVNITLANFNETKGPLCVDTSHFTTKYVAVYANVGRWSASINTGNCPFSFGKVNNFVKFGSVCFSLKDIPGGCAMPIVANWAYSKYYTIGSLYVSWSDGDGITGVPQPVEGVSSGSGGGGESQVRQQFSKDIEKLLNEQVNKEMQSSNLYMSMSSWCYTHSLDGAGLFLFDHAAEEYEHAKKLIIFLNENNVPVQLTSISAPEHKFEGLTQIFQKAYEHEQHISESINNIVDHAIKSKDHATFNFLQWYVAEQHEEEVLFKDILDKIELIGNENHGLYLADQYVKGIAKSRKSGS

SEQ ID NO: 306 - protein, 989 aa, Artificial Sequence
  Description of Artificial Sequence: Synthetic polypeptide
NITNLCPFGEVFNATRFASVYAWNRKRISNCVADYSVLYNSASFSTFKCYGVSPTKLNDLCFTNVYADSFVIRGDEVRQIAPGQTGKIADYNYKLPDDFTGCVIAWNSNNLDSKVGGNYNYLYRLFRKSNLKPFERDISTEIYQAGSTPCNGVEGFNCYFPLQSYGFQPTNGVGYQPYRVVVLSFELLHAPATVCGGGGSTNLCPFGEVFNATKFPSVYAWERKKISNCVADYSVLYNSTFFSTFKCYGVSATKLNDLCFSNVYADSFVVKGDDVRQIAPGQTGVIADYNYKLPDDFMGCVLAWNTRNIDATSTGNYNYKYRYLRHGKLRPFERDISNVPFSPDGKPCTPPALNCYWPLNDYGFYTTTGIGYQPCGGGGSDCDIDKWLNNFNVPSPLNWERKIFSNCNFNLSTLLRLVHTDSFSCNNFDESKIYGSCFKSIVLDKFAIPNSRRSDLQLGSSGFLQSSNYKIDTTSSSCQLYYSLPAINVTINNYNPSSWNRRYGFNNFNLSSHSVVYSRYCFSVNNTFCPCAKPSFASSCKSHKPPSASCPIGTNYRSCESTTVLDHTDWCRCSCLPDPITAYDPRSCSQKKSLVGVGEHCAGFGVDEEKCGVLDGSYNVSCLCSTDAFLGWSYDTCVSNNRCNIFSNFILNGCGGGGSSIVSLPVYHKHTFIVLYVDFKPQSGGGKCFNCYPAGVNITLANFNETKGPLCVDTSHFTTKYVAVYANVGRWSASINTGNCPFSFGKVNNFVKFGSVCFSLKDIPGGCAMPIVANWAYSKYYTIGSLYVSWSDGDGITGVPQPVEGVSSGSGGGGESQVRQQFSKDIEKLLNEQVNKEMQSSNLYMSMSSWCYTHSLDGAGLFLFDHAAEEYEHAKKLIIFLNENNVPVQLTSISAPEHKFEGLTQIFQKAYEHEQHISESINNIVDHAIKSKDHATFNFLQWYVAEQHEEEVLFKDILDKIELIGNENHGLYLADQYVKGIAKSRKSGS

SEQ ID NO: 307 - protein, 1061 aa, Artificial Sequence
  Description of Artificial Sequence: Synthetic polypeptide
NITNLCPFGEVFNATRFASVYAWNRKRISNCVADYSVLYNSASFSTFKCYGVSPTKLNDLCFTNVYADSFVIRGDEVRQIAPGQTGKIADYNYKLPDDFTGCVIAWNSNNLDSKVGGNYNYLYRLFRKSNLKPFERDISTEIYQAGSTPCNGVEGFNCYFPLQSYGFQPTNGVGYQPYRVVVLSFELLHAPATVCGGGGSTNLCPFGEVFNATKFPSVYAWERKKISNCVADYSVLYNSTFFSTFKCYGVSATKLNDLCFSNVYADSFVVKGDDVRQIAPGQTGVIADYNYKLPDDFMGCVLAWNTRNIDATSTGNYNYKYRYLRHGKLRPFERDISNVPFSPDGKPCTPPALNCYWPLNDYGFYTTTGIGYQPCGGGGSDCDIDKWLNNFNVPSPLNWERKIFSNCNFNLSTLLRLVHTDSFSCNNFDESKIYGSCFKSIVLDKFAIPNSRRSDLQLGSSGFLQSSNYKIDTTSSSCQLYYSLPAINVTINNYNPSSWNRRYGFNNFNLSSHSVVYSRYCFSVNNTFCPCAKPSFASSCKSHKPPSASCPIGTNYRSCESTTVLDHTDWCRCSCLPDPITAYDPRSCSQKKSLVGVGEHCAGFGVDEEKCGVLDGSYNVSCLCSTDAFLGWSYDTCVSNNRCNIFSNFILNGCGGGGSEAKPSGSVVEQAEGVECDFSPLLSGTPPQVYNFKRLVFTNCNYNLTKLLSLFSVNDFTCSQISPAAIASNCYSSLILDYFSYPLSMKSDLSVSSAGPISQFNYKQSFSNPTCLILATVPHNLTTITKPLKYSYINKCSRFLSDDRTEVPQLVNANQYSPCVSIVPSTVWEDGDYYRKQLSPLEGGGWLVASGSTVAMTEQLQMGFGITVQYGTDTNSVCPKGSGGGGESQVRQQFSKDIEKLLNEQVNKEMQSSNLYMSMSSWCYTHSLDGAGLFLFDHAAEEYEHAKKLIIFLNENNVPVQLTSISAPEHKFEGLTQIFQKAYEHEQHISESINNIVDHAIKSKDHATFNFLQWYVAEQHEEEVLFKDILDKIELIGNENHGLYLADQYVKGIAKSRKSGS

SEQ ID NO: 308 - protein, 205 aa, Artificial Sequence
  Description of Artificial Sequence: Synthetic polypeptide
NITNLCPFGEVFNATRFASVYAWNRKRISNCVADYSVLYNSASFSTFKCYGVSPTKLNDLCFTNVYADSFVIRGDEVRQIAPGQTGKIADYNYKLPDDFTGCVIAWNSNNLDSKVGGNYNYLYRLFRKSNLKPFERDISTEIYQAGSTPCNGVKGFNCYFPLQSYGFQPTNGVGYQPYRVVVLSFELLHAPATVCGPGSHHHHHH

SEQ ID NO: 309 - protein, 205 aa, Artificial Sequence
  Description of Artificial Sequence: Synthetic polypeptide
NITNLCPFGEVFNATRFASVYAWNRKRISNCVADYSVLYNSASFSTFKCYGVSPTKLNDLCFTNVYADSFVIRGDEVRQIAPGQTGKIADYNYKLPDDFTGCVIAWNSNNLDSKVGGNYNYLYRLFRKSNLKPFERDISTEIYQAGSTPCNGVEGFNCYFPLQSYGFQPTYGVGYQPYRVVVLSFELLHAPATVCGPGSHHHHHH

SEQ ID NO: 310 - protein, 205 aa, Artificial Sequence
  Description of Artificial Sequence: Synthetic polypeptide
NITNLCPFGEVFNATRFASVYAWNRKRISNCVADYSVLYNSASFSTFKCYGVSPTKLNDLCFTNVYADSFVIRGDEVRQIAPGQTGKIADYNYKLPDDFTGCVIAWNSNNLDSKVGGNYNYLYRLFRKSNLKPFERDISTEIYQAGSTPCNGVKGFNCYFPLQSYGFQPTYGVGYQPYRVVVLSFELLHAPATVCGPGSHHHHHH

SEQ ID NO: 311 - protein, 205 aa, Artificial Sequence
  Description of Artificial Sequence: Synthetic polypeptide
NITNLCPFGEVFNATRFASVYAWNRKRISNCVADYSVLYNSASFSTFKCYGVSPTKLNDLCFTNVYADSFVIRGDEVRQIAPGQTGNIADYNYKLPDDFTGCVIAWNSNNLDSKVGGNYNYLYRLFRKSNLKPFERDISTEIYQAGSTPCNGVEGFNCYFPLQSYGFQPTNGVGYQPYRVVVLSFELLHAPATVCGPGSHHHHHH

SEQ ID NO: 312 - protein, 205 aa, Artificial Sequence
  Description of Artificial Sequence: Synthetic polypeptide
NITNLCPFGEVFNATRFASVYAWNRKRISNCVADYSVLYNSASFSTFKCYGVSPTKLNDLCFTNVYADSFVIRGDEVRQIAPGQTGNIADYNYKLPDDFTGCVIAWNSNNLDSKVGGNYNYLYRLFRKSNLKPFERDISTEIYQAGSTPCNGVKGFNCYFPLQSYGFQPTYGVGYQPYRVVVLSFELLHAPATVCGPGSHHHHHH

SEQ ID NO: 313 - protein, 675 aa, Severe acute respiratory syndrome coronavirus 2
SSQCVNLTTRTQLPPAYTNSFTRGVYYPDKVFRSSVLHSTQDLFLPFFSNVTWFHAIHVSGTNGTKRFDNPVLPFNDGVYFASTEKSNIIRGWIFGTTLDSKTQSLLIVNNATNVVIKVCEFQFCNDPFLGVYYHKNNKSWMESEFRVYSSANNCTFEYVSQPFLMDLEGKQGNFKNLREFVFKNIDGYFKIYSKHTPINLVRDLPQGFSALEPLVDLPIGINITRFQTLLALHRSYLTPGDSSSGWTAGAAAYYVGYLQPRTFLLKYNENGTITDAVDCALDPLSETKCTLKSFTVEKGIYQTSNFRVQPTESIVRFPNITNLCPFGEVFNATRFASVYAWNRKRISNCVADYSVLYNSASFSTFKCYGVSPTKLNDLCFTNVYADSFVIRGDEVRQIAPGQTGKIADYNYKLPDDFTGCVIAWNSNNLDSKVGGNYNYLYRLFRKSNLKPFERDISTEIYQAGSTPCNGVEGFNCYFPLQSYGFQPTNGVGYQPYRVVVLSFELLHAPATVCGPKKSTNLVKNKCVNFNFNGLTGTGVLTESNKKFLPFQQFGRDIADTTDAVRDPQTLEILDITPCSFGGVSVITPGTNTSNQVAVLYQDVNCTEVPVAIHADQLTPTWRVYSTGSNVFQTRAGCLIGAEHVNNSYECDIPIGAGICASYQTGGSQSIIAYT

SEQ ID NO: 314 - protein, 1127 aa, Severe acute respiratory syndrome-related coronavirus
SDLDRCTTFDDVQAPNYTQHTSSMRGVYYPDEIFRSDTLYLTQDLFLPFYSNVTGFHTINHTFGNPVIPFKDGIYFAATEKSNVVRGWVFGSTMNNKSQSVIIINNSTNVVIRACNFELCDNPFFAVSKPMGTQTHTMIFDNAFNCTFEYISDAFSLDVSEKSGNFKHLREFVFKNKDGFLYVYKGYQPIDVVRDLPSGFNTLKPIFKLPLGINITNFRAILTAFSPAQDIWGTSAAAYFVGYLKPTTFMLKYDENGTITDAVDCSQNPLAELKCSVKSFEIDKGIYQTSNFRVVPSGDVVRFPNITNLCPFGEVFNATKFPSVYAWERKKISNCVADYSVLYNSTFFSTFKCYGVSATKLNDLCFSNVYADSFVVKGDDVRQIAPGQTGVIADYNYKLPDDFMGCVLAWNTRNIDATSTGNYNYKYRYLRHGKLRPFERDISNVPFSPDGKPCTPPALNCYWPLNDYGFYTTTGIGYQPYRVVVLSFELLNAPATVCGPKLSTDLIKNQCVNFNFNGLTGTGVLTPSSKRFQPFQQFGRDVSDFTDSVRDPKTSEILDISPCAFGGVSVITPGTNASSEVAVLYQDVNCTDVSTAIHADQLTPAWRIYSTGNNVFQTQAGCLIGAEHVDTSYECDIPIGAGICASYHTVSLLRSTSQKSIVAYTMSLGADSSIAYSNNTIAIPTNFSISITTEVMPVSMAKTSVDCNMYICGDSTECANLLLQYGSFCTQLNRALSGIAAEQDRNTREVFAQVKQMYKTPTLKYFGGFNFSQILPDPLKPTKRSFIEDLLFNKVTLADAGFMKQYGECLGDINARDLICAQKFNGLTVLPPLLTDDMIAAYTAALVSGTATAGWTFGAGAALQIPFAMQMAYRFNGIGVTQNVLYENQKQIANQFNKAISQIQESLTTTSTALGKLQDVVNQNAQALNTLVKQLSSNFGAISSVLNDILSRLDPPEAEVQIDRLITGRLQSLQTYVTQQLIRAAEIRASANLAATKMSECVLGQSKRVDFCGKGYHLMSFPQAAPHGVVFLHVTYVPSQERNFTTAPAICHEGKAYFPREGVFVFNGTSWFITQRNFFSPQIITTDNTFVSGNCDVVIGIINNTVYDPLQSELDSIKEELDKIHKN

SEQ ID NO: 315 - protein, 4 aa, Severe acute respiratory syndrome coronavirus 2
RRAS

SEQ ID NO: 316 - protein, 4 aa, Artificial Sequence
  Description of Artificial Sequence: Synthetic peptide
GSAS

SEQ ID NO: 317 - protein, 10 aa, Artificial Sequence
  Description of Artificial Sequence: Synthetic His tag
  SITE (1)..(10): This sequence may encompass 5-10 residues
HHHHHHHHHH

SEQ ID NO: 318 - protein, 6 aa, Artificial Sequence
  Description of Artificial Sequence: Synthetic 6xHis tag
HHHHHH

SEQ ID NO: 319 - DNA, 18 bp, Artificial Sequence
  Description of Artificial Sequence: Synthetic primer
tcgtggtattcttgctag

SEQ ID NO: 320 - DNA, 20 bp, Artificial Sequence
  Description of Artificial Sequence: Synthetic primer
gaaggttttacaagactcac

SEQ ID NO: 321 - DNA, 21 bp, Artificial Sequence
  Description of Artificial Sequence: Synthetic probe
acactagccatccttactgcg

SEQ ID NO: 322 - DNA, 23 bp, Artificial Sequence
  Description of Artificial Sequence: Synthetic primer
cgatctcttgtagatctgttctc

SEQ ID NO: 323 - DNA, 21 bp, Artificial Sequence
  Description of Artificial Sequence: Synthetic primer
ctctgagagcggctctattgg

SEQ ID NO: 324 - DNA, 24 bp, Artificial Sequence
  Description of Artificial Sequence: Synthetic primer
gttccctacaacgagcctaaattc

SEQ ID NO: 325 - DNA, 26 bp, Artificial Sequence
  Description of Artificial Sequence: Synthetic probe
tcagacacgcggtccgctataacgat

SEQ ID NO: 326 - DNA, 62 bp, Artificial Sequence
  Description of Artificial Sequence: Synthetic primer
taatacgactcactataggggaattgtgcgtggatgaggcgatctcttgtagatctgttctc

SEQ ID NO: 327 - protein, 8 aa, Artificial Sequence
  Description of Artificial Sequence: Synthetic peptide
HHHHHHHH

SEQ ID NO: 328 - protein, 22 aa, Severe acute respiratory syndrome coronavirus 2
PLQPELDSFKEELDKYFKNTSP

SEQ ID NO: 329 - protein, 15 aa, Artificial Sequence
  Description of Artificial Sequence: Synthetic peptide
PLQPELDSFKEELDK

SEQ ID NO: 330 - protein, 19 aa, Artificial Sequence
  Description of Artificial Sequence: Synthetic peptide
PLQSELDSIKEELDKIHKN

SEQ ID NO: 331 - protein, 16 aa, Artificial Sequence
  Description of Artificial Sequence: Synthetic peptide
GSGGSGESQVRQQFSK

SEQ ID NO: 332 - protein, 30 aa, Severe acute respiratory syndrome coronavirus 2
CASYQTQTNSPRRARSVASQSIIAYTMSLG

SEQ ID NO: 333 - protein, 30 aa, Artificial Sequence
  Description of Artificial Sequence: Synthetic polypeptide
CASYQTQTNSPGSASSVASQSIIAYTMSLG

SEQ ID NO: 334 - protein, 6 aa, Artificial Sequence
  Description of Artificial Sequence: Synthetic peptide
CASYQT

SEQ ID NO: 335 - protein, 26 aa, Artificial Sequence
  Description of Artificial Sequence: Synthetic peptide
CASYQTQTNSPGSASSVASQSIIAYT

SEQ ID NO: 336 - protein, 16 aa, Artificial Sequence
  Description of Artificial Sequence: Synthetic peptide
CASYQTGGSQSIIAYT

SEQ ID NO: 337 - protein, 33 aa, Severe acute respiratory syndrome coronavirus 2
PLQPELDSFKEELDKYFKNTSPDVDLGDISGIN

SEQ ID NO: 338 - protein, 33 aa, Artificial Sequence
  Description of Artificial Sequence: Synthetic polypeptide
PLQSELDSIKEELDKIHKNLDSIKEELDKIHKN

SEQ ID NO: 339 - protein, 4 aa, Artificial Sequence
  Description of Artificial Sequence: Synthetic peptide
MGIL

SEQ ID NO: 340 - protein, 7 aa, Artificial Sequence
  Description of Artificial Sequence: Synthetic peptide
GIVNNTV

SEQ ID NO: 341 - protein, 5 aa, Artificial Sequence
  Description of Artificial Sequence: Synthetic peptide
GKYEQ

SEQ ID NO: 342 - protein, 22 aa, Artificial Sequence
  Description of Artificial Sequence: Synthetic peptide
VNNTVYDPLQPELDSFKEELDK

SEQ ID NO: 343 - protein, 26 aa, Artificial Sequence
  Description of Artificial Sequence: Synthetic peptide
VNNTVYDPLQSELDSIKEELDKIHKN

SEQ ID NO: 344 - protein, 26 aa, Artificial Sequence
  Description of Artificial Sequence: Synthetic peptide
VNNTVYDPLQSEIDSIKEEIDKIHKN

SEQ ID NO: 345 - protein, 6 aa, Artificial Sequence
  Description of Artificial Sequence: Synthetic peptide
SFLGRS

SEQ ID NO: 346 - protein, 16 aa, Artificial Sequence
  Description of Artificial Sequence: Synthetic peptide
ESQVRQQFSKGSGGSG
